United States Patent Application Publication US 2024/0117295 A1 - sequence listing, part 3

SEQ ID NO: 4 - DNA, 3979097 bp, Artificial Sequence (residues 1-1,989,549 of 3,979,097)
  Synthetic E.coli genome
agcttttcattctgactgcaacgggcaatatgtctctgtgtggattaaaaaaagagtgtctgatagcagcttctgaactggttacctgccgtgagtaaattaaaattttattgacttaggtcactaaatactttaaccaatataggcatagcgcacagacagataaaaattacagagtacacaacatccatgaaacgcattagcaccaccattaccaccaccatcaccattaccacaggtaacggtgcgggctgacgcgtacaggaaacacagaaaaaagcccgcacctgacagtgcgggctttttttttcgaccaaaggtaacgaggtaacaaccatgcgagtgttgaagttcggcggtacaagtgtggcaaatgcagaacgttttctgcgtgttgccgatattctggaaagcaatgccaggcaggggcaggtggccaccgtcctctctgcccccgccaaaatcaccaaccacctggtggcgatgattgaaaaaaccattagcggccaggatgctttacccaatatcagcgatgccgaacgtatttttgccgaacttttgacgggactcgccgccgcccagccggggttcccgctggcgcaattgaaaactttcgtcgatcaggaatttgcccaaataaaacatgtcctgcatggcattagtttgttggggcagtgcccggatagcatcaacgctgcgctgatttgccgtggcgagaaaatgagcatcgccattatggccggcgtattagaagcgcgcggtcacaacgttactgttatcgatccggtcgaaaaactgctggcagtggggcattacctcgaatctaccgtcgatattgctgagtccacccgccgtattgcggcaagccgcattccggctgatcacatggtgctgatggcaggtttcaccgccggtaatgaaaaaggcgaactggtggtgcttggacgcaacggttccgactactctgctgcggtgctggctgcctgtttacgcgccgattgttgcgagatttggacggacgttgacggggtctatacctgcgacccgcgtcaggtgcccgatgcgaggttgttgaagagcatgtcctaccaggaagcgatggagctttcctacttcggcgctaaagttcttcacccccgcaccattacccccatcgcccagttccagatcccttgcctgattaaaaataccggaaatcctcaagcaccaggtacgctcattggtgccagccgtgatgaagacgaattaccggtcaagggcatttccaatctgaataacatggcaatgttcagcgtttctggtccggggatgaaagggatggtcggcatggcggcgcgcgtctttgcagcgatgagtcgcgcccgtatttccgtggtgctgattacgcaaagttcttccgaatacagcatcagtttctgcgttccacaaagcgactgtgtgcgagctgaacgggcaatgcaggaagagttctacctggaactgaaagaaggcttactggagccgctggcagtgacggaacggctggccattatcagcgtggtaggtgatggtatgcgcaccttgcgtgggatcagcgcgaaattctttgccgcactggcccgcgccaatatcaacattgtcgccattgctcagggatcttctgaacgcagtatctctgtcgtggtaaataacgatgatgcgaccactggcgtgcgcgttactcatcagatgctgttcaataccgatcaggttatcgaagtgtttgtgattggcgtcggtggcgttggcggtgcgctgctggagcaactgaagcgtcagcaaagctggctgaagaataaacatatcgacttacgtgtctgcggtgttgccaacagcaaggctctgctcaccaatgtacatggccttaatctggaaaactggcaggaagaactggcgcaagccaaagagccgtttaatctcgggcgcttaattcgcctcgtgaaagaatatcatctgctgaacccggtcattgttgactgcacttccagccaggcagtggcggatcaatatgccgacttcctgcgcgaaggtttccacgttgtcacgccgaacaaaaaggccaacaccagcagcatggattactaccatcagttgcgttatgcggcggaaaaaagccggcgtaaattcctctatgacaccaacgttggggctggattaccggttattgagaacctgcaaaatctgctcaatgcaggtgatgaattgatgaagttctccggcattctttctggtagcctttcttatatcttcggcaagttagacgaaggcatgagtttctccgaggcgaccacgctggcgcgggaaatgggttataccgaaccggacccgcgagatgatctttctggtatggatgtggcgcgtaaactattgattctcgctcgtgaaacgggacgtgaactggagctggcggatattgaaattgaacctgtgctgcccgcagagtttaacgccgagggtgatgttgccgcttttatggcgaatctgagtcaactcgacgatctctttgccgcgcgcgtggcgaaggcccgtgatgaaggaaaagttttgcgctatgttggcaatattgatgaagatggcgtctgccgcgtgaagattgccgaagtggatggtaatgatccgctgttcaaagtgaaaaatggcgaaaacgccctggccttctatagccactattatcagccgctgccgttggtactgcgcggatatggtgcgggcaatgacgttacagctgccggtgtctttgctgatctgctacgtaccctcagttggaagttaggagtctgacatggttaaagtttatgccccggcttccagtgccaatatgagcgtcgggtttgatgtgctcggggcggcggtgacacctgttgatggtgcattgctcggagatgtagtcacggttgaggcggcagagacattcagtctcaacaacctcggacgctttgccgataagctgccgagtgaaccacgggaaaatatcgtttatcagtgctgggagcgtttttgccaggaactgggtaagcaaattccagtggcgatgaccctggaaaagaatatgccgatcggtagcggcttaggctccagtgcctgtagcgtggtcgcggcgctgatggcgatgaatgaacactgcggcaagccgcttaatgacactcgtttgctggctttgatgggcgagctggaaggccgtatctccggcagcattcattacgacaacgtggcaccgtgttttctcggtggtatgcagttgatgatcgaagaaaacgacatcatcagccagcaagtgccagggtttgatgagtggctgtgggtgctggcgtatccggggattaaagtcagcacggcagaagccagggctattttaccggcgcagtatcgccgccaggattgcattgcgcacgggcgacatctggcaggcttcattcacgcctgctattcccgtcagcctgagcttgccgcgaagctgatgaaagatgttatcgctgaaccctaccgtgaacggttactgccaggcttccggcaggcgcggcaggcggtcgcggaaatcggcgcggtagcgagcggtatctccggctccggcccgaccttgttcgctctgtgtgacaagccggaaaccgcccagcgcgttgccgactggttgggtaagaactacctgcaaaatcaggaaggttttgttcatatttgccggctggatacggcgggcgcacgagtactggaaaactaaatgaaactctacaatctgaaagatcacaacgagcaggtcagctttgcgcaagccgtaacccaggggttgggcaaaaatcaggggctgttttttccgcacgacctgccggaattcagcctgactgaaattgatgagatgctgaagctggattttgtcacccgcagtgcgaagatcctcagcgcgtttattggtgatgaaatcccacaggaaatcctggaagagcgcgtgcgcgcggcgtttgccttcccggctccggtcgccaatgttgaaagcgatgtcggttgtctggaattgttccacgggccaacgctggcatttaaagatttcggcggtcgctttatggcacaaatgctgacccatattgcgggtgataagccagtgaccattctgaccgcgacctccggtgataccggagcggcagtggctcatgctttctacggtttaccgaatgtgaaagtggttatcctctatccacgaggcaaaatcagtccactgcaagaaaaactgttctgtacattgggcggcaatatcgaaactgttgccatcgacggcgatttcgatgcctgtcaggcgctggtgaagcaggcgtttgatgatgaagaactgaaagtggcgctagggttaaacagcgctaacagcattaacatcagccgtttgctggcgcagatttgctactactttgaagctgttgcgcagctgccgcaggagacgcgcaaccagctggttgtcagcgtgccaagcggaaacttcggcgatttgacggcgggtctgctggcgaagagtctcggtctgccggtgaaacgttttattgctgcgaccaacgtgaacgataccgtgccacgtttcctgcacgacggtcagtggagtcccaaagcgactcaggcgacgttatccaacgcgatggacgtgagtcagccgaacaactggccgcgtgtggaagagttgttccgccgcaaaatctggcaactgaaagagctgggttatgcagccgtggatgatgaaaccacgcaacagacaatgcgtgagttaaaagaactgggctacactagcgagccgcacgctgccgtagcttatcgtgcgctgcgtgatcagttgaatccaggcgaatatggcttgttcctcggcaccgcgcatccggcgaaatttaaagagagcgtggaagcgattctcggtgaaacgttggatctgccaaaagagctggcagaacgtgctgatttacccttgcttagtcataatctgcccgccgattttgctgcgttgcgtaaattgatgatgaatcatcagtaaaatctattcattatctcaatcaggccgggtttgcttttatgcagcccggcttttttatgaagaaattatggagaaaaatgacagggaaaaaggagaaattctcaataaatgcggtaacttagagattaggattgcggagaataacaaccgccgttctcatcgagtaatctccggatatcgacccataacgggcaatgataaaaggagtaacctgtgaaaaagatgcaatctatcgtactcgcactttccctggttctggtcgctcccatggcagcacaggctgcggaaattacgttagtcccgagtgtaaaattacagataggcgatcgtgataatcgtggctattactgggatggaggtcactggcgcgaccacggctggtggaaacaacattatgaatggcgaggcaatcgctggcacctacacggaccgccgccaccgccgcgccaccataagaaagctcctcatgatcatcacggcggtcatggtccaggcaaacatcaccgctaaatgacaaatgccgggtaacaatccggcattcagcgcctgatgcgacgctggcgcgtcttatcaggcctacgttaattctgcaatatattgaatctgcatgcttttgtaggcaggataaggcgttcacgccgcatccggcattgactgcaaacttaacgctgctcgtagcgtttaaacaccagttcgccattgctggaggaatcttcatcaaagaagtaaccttcgctattaaaaccagtcagttgctctggtttggtcagccgattttcaataatgaaacgactcatcagaccgcgtgctttcttagcgtagaagctgatgatcttaaatttgccgttcttctcatcgaggaacaccggcttgataatctcggcattcaatttcttcggcttcacgcttttaaaatactcatcactcgccagattaatcaccacattatcgccttgtgctgcgagcgcctcgttcagcttgttggtgatgatatctccccagaattgatacagatctttccctcgggcattctcaagacggatccccatttccagacgataaggctgcattaaatcgagcgggcggagtacgccatacaagccggaaagcattcgcaaatgctgttgggcaaaatcgaaatcgtcttcgctgaaggtttcggcctgcaagccggtgtagacatcacctttaaacgccagaatcgcctggcgggcattcgccggcgtgaaatctggctgccagtcatgaaagcgagcggcgttgatacccgccagtttgtcgctgatgcgcatcagcgtgctaatctgcggaggcgtcagtttccgcgcctcatggatcaactgctgggaattgtctaacagctccggcagcgtatagcgcgtggtggtcaacgggctttggtaatcaagcgttttcgcaggactaataagaatcagcatatccagtccttgcaggaaatttatgccgactttagcaaaaaatgagaatgagttgatcgatagttgtgattactcctggctaacatcatcccacgcgtccggagaaagctggcgaccgatatccggataacgcaatggatcaaacaccgggcgcacgccgagtttacgctggcgtagataatcactggcaatggtatgaaccacagggctgagcagtaaaatggcggtcaaattggtaatagccatgcaggccattatgatatctgccagttgccacatcagcggaaggcttagcaaggtgccgccgatgaccgttgcgaaggtgcagatccgcaaacaccagatcgctttagggttgttcaggcgtaaaaagaagagattgttttcggcataaatgtagttggcaacgatggagctgaaggcaaacagaataaccacaagggtaacaaactcagcaccccaggaacccattagcacccgcatcgccttctggataagctgaataccttccagcggcatgtaggttgtgccgttacccgccagtaatatcagcatggcgcttgccgtacagatgaccagggtgtcgataaaaatgccaatcatctggacaatcccttgcgctgccggatgcggaggccaggacgccgctgccgctgccgcgtttggcgtgctacccattcccgcctcattggaaaacatactgcgctgaaaaccgttagtaatcgcctggcttaaggtatatcccgccgcgccgcctgccgcttcctgccagccaaaagcactctcaaaaatagaccaaatgacgtggggaagttgcccgatattcattacgcaaattaccaggctggtcagtacccagattatcgccatcaacgggacaaagccctgcatgagccgggcgacgccatgaagaccgcgagtgattgccagcagagtaaagacagcgagaataatgcctgtcaccagcgggggaaaatcaaaagaaaaactcagggcgcgggcaacggcgttcgcttgaactccgctgaaaattatgccataggcgatgagcaaaaagacggcgaacagaacgcccatccagcgcatccccagcccgcgcgccatataccatgccggtccgccacgaaactgcccattgacgtcacgttctttataaagttgtgccagagaacattcggcaaagctggtcgccatgccgataaacgcggcaacccacatccaaaagacggctccaggtccaccggcggtaatagccagcgcaacgccggccaggttgccgctacccacgcgcgccgcaagactggtacacaaactctgaaaactggttaaaccgcctggctgtggatgaatgctatttttaagacttttgccaaactggcggatgtagcgaaactgcacaaatccggtgcgaaaagtgaaccaacaacctgcgccgaagagcaggtaaatcattacgcttccccaaaggacgctgttaatgaaggagaaaaaatctggcatgcatatccctcttattgccggccgcgatgactttcctgtgtaaacgttaccaattgtttaagaagtatatacgctacgaggtacttgataacttctgcgtagcatacatgaggttttgtataaaaatggcgggcgatatcaacgcagtgtcagaaatccgaaacagtctcgcctggcgataaccgtcttgtcggcggttgcgctgacgttgcgtcgtgatatcatcagggcagaccggttacatccccctaacaagctgtttaaagagaaatactatcatgacggacaaattgacctcccttcgtcagtacaccaccgtagtggccgacactggggacatcgcggcaatgaagctgtatcaaccgcaggatgccacaaccaacccttctctcattcttaacgcagcgcagattccggaataccgtaagttgattgatgatgctgtcgcctgggcgaaacagcagagcaacgatcgcgcgcagcagatcgtggacgcgaccgacaaactggcagtaaatattggtctggaaatcctgaaactggttccgggccgtatcagtactgaagttgatgcgcgtctttcctatgacaccgaagcgagtattgcgaaagcaaaacgcctgatcaaactctacaacgatgctggtattagcaacgatcgtattctgatcaaactggcttctacctggcagggtatccgtgctgcagaacagctggaaaaagaaggcatcaactgtaacctgaccctgctgttctccttcgctcaggctcgtgcttgtgcggaagcgggcgtgttcctgatcagcccgtttgttggccgtattcttgactggtacaaagcgaataccgataagaaagagtacgctccggcagaagatccgggcgtggtttctgtatctgaaatctaccagtactacaaagagcacggttatgaaaccgtggttatgggcgcaagcttccgtaacatcggcgaaattctggaactggcaggctgcgaccgtctgaccatcgcaccggcactgctgaaagagctggcggagagcgaaggggctatcgaacgtaaactgtcttacaccggcgaagtgaaagcgcgtccggcgcgtatcactgagtccgagttcctgtggcagcacaaccaggatccaatggcagtagataaactggcggaaggtatccgtaagtttgctattgaccaggaaaaactggaaaaaatgatcggcgatctgctgtaatcattcttagcgtgaccgggaagtcggtcacgctacctcttctgaagcctgtctgtcactcccttcgcagtgtatcattctgtttaacgagactgtttaaacggaaaaatcttgatgaatactttacgtattggcttagtttccatctctgatcgcgcatccagcggcgtttatcaggataaaggcatccctgcgctggaagaatggctgacaagcgcgctaaccacgccgtttgaactggaaacccgcttaatccccgatgagcaggcgatcatcgagcaaacgttgtgtgagctggtggatgaaatgagttgccatctggtgctcaccacgggcggaactggcccggcgcgtcgtgacgtaacgcccgatgcgacgctggcagtagcggaccgcgagatgcctggctttggtgaacagatgcgccagatcagcctgcattttgtaccaactgcgatccttagccgtcaggtgggcgtgattcgcaaacaggcgctgatccttaacttacccggtcagccgaagtctattaaagagacgctggaaggtgtgaaggacgctgagggtaacgttgtggtacacggtatttttgccagcgtaccgtactgcattcagttgctggaagggccatacgttgaaacggcaccggaagtggttgcagcattcagaccgaagagtgcaagacgcgacgttagcgaataaaaaaatccccccgagcggggggatctcaaaacaattagtgggattcaccaatcggcagaacggtgcgaccaaactgctcgttcagtacttcacccatcgccagatagattgcgctggcaccgcagatcagcccaatccagccggcaaagtggatgattgcggcgttaccggcaatgttaccgatcgccagcagggcaaacagcacggtcaggctaaagaaaacgaattgcagaacgcgtgcgcctttcagcgtgccgaagaacataaacagcgtaaatacgccccacagacccaggtagacaccaaggaactgtgcatttggcgcatcggtcagacccagtttcggcatcagcagaatcgcaaccagcgtcagccagaaagaaccgtaagaggtgaatgcggttaaaccgaaagtgttgccttttttgtactccagcagaccagcaaaaatttgcgcgatgccgccgtagaaaatgcccatggcaagaataataccgtccagagcgaaataacccacgttgtgcaggttaagcagaatggtggtcatgccgaagcccatcaggcccagcggtgccggattagccaacttagtgttgcccataattcctcaaaaatcatcatcgaatgaatggtgaaataatttccctgaataactgtagtgttttcagggcgcggcataataatcagccagtggggcagtgtctacgatcttttgaggggaaaatgaaaattttccccggtttccggtatcagacctgagtggcgctaaccatccggcgcaggcaggcgatttgcagtacggctggaatcgtcacgcgataggcgctgccgctgaccgctttaaccccatttagtgccgcacctacagggcctcccagccccgcgccgcgcagcaaaccatgcccaagtacgctcattgctgcgtgggtgcgtaaaatgcgggtcagttggctggaaagcaaatggctcacaccttttgccaataatttgtctttcatcagcagcggcagcagctcttccagctcattcaccctggcatcgaccgcgtgcagaaactcctgcttatgttcctcgtccattttcttccaggtattacgcagaaattgttccagtaactgttgctcaatttcaaacgtagacatctctttgtcggctttcagcttcaatcgcttactaacatcgagcaaaatggcccgatacaatttaccgtgtccgcgcagtttgttggcgatactatcgccaccaaaatgctgtaattctccggcaatcagctgccagttgcggcgatgttgctcgggatgcccttccatgcttttaaacagttcgttgcgcatcagtacgctggagaggcgagttttgcctttttcattatgggtgagcaatcgggcgaaatttgccaactgttcctcactacaatgctgaagaaaatccagatcactatcattcaggtaattaacattcattttttgtggcttctatattctggcgttagtcgtcgccgataattttcagcgtggccatatcgctactgttcaccgtatgaccgctaaaggtgattttactgacgcagcgtttattgtcgttatcgctgttaatgttgatccagtcagtggtttgcccttcttttatttcactaggaatattcaggctctgactggcgctacgggcggctttgaaataaacgcttgcaccgcttaactgtaaatcgccatggtcggcagagagttgtatgcgtttcacaatgcgacaaacaggaagtttcagcgccagatcgttggtttcgttacgcggcattgcaatggcgccgaggagtttatggtcgtttgcctgcgccgtgcagcacagcatcaggctaatcgccaggctggcggaaatcgtaaaaacggatttcataaggattctcttagtgggaagaggtagggggatgaatacccactagtttactgctgataaagagaagattcaggcacgtaatcttttctttttattacaattttttgatgaatgccttggctgcgattcattctttatatgaataaaattgctgtcaattttacgtcttgtcctgccatatcgcgaaatttctgcgcaaaagcacaaaaaatttttgcatctcccccttgatgacgtggtttacgaccccatttagtagtcaaccgcagtgagtgagtctgcaaaaaaatgaaattgggcagttgaaaccagacgtttcgcccctattacagactcacaaccacatgatgaccgaatatatagtggagacgtttagatgggtaaaataattggtatcgacctgggtactaccaactcttgtgtagcgattatggatggcaccactcctcgcgtgctggagaacgccgaaggcgatcgcaccacgccttctatcattgcctatacccaggatggtgaaactctagttggtcagccggctaaacgtcaggcagtgacgaacccgcaaaacactctgtttgcgattaaacgcctgattggtcgccgcttccaggacgaagaagtacagcgtgatgtttccatcatgccgttcaaaattattgctgctgataacggcgacgcatgggtcgaagttaaaggccagaaaatggcaccgccgcagatttctgctgaagtgctgaaaaaaatgaagaaaaccgctgaagattacctgggtgaaccggtaactgaagctgttatcaccgtaccggcatactttaacgatgctcagcgtcaggcaaccaaagacgcaggccgtatcgctggtctggaagtaaaacgtatcatcaacgaaccgaccgcagctgcgctggcttacggtctggacaaaggcactggcaaccgtactatcgcggtttatgacctgggtggtggtactttcgatatttctattatcgaaatcgacgaagttgacggcgaaaaaaccttcgaagttctggcaaccaacggtgatacccacctggggggtgaagacttcgacagccgtctgatcaactatctggttgaagaattcaagaaagatcagggcattgacctgcgcaacgatccgctggcaatgcagcgcctgaaagaagcggcagaaaaagcgaaaatcgaactgtcttccgctcagcagaccgacgttaacctgccatacatcactgcagacgcgaccggtccgaaacacatgaacatcaaagtgactcgtgcgaaactggaaagcctggttgaagatctggtaaaccgttccattgagccgctgaaagttgcactgcaggacgctggcctgtccgtatctgatatcgacgacgttatcctcgttggtggtcagactcgtatgccaatggttcagaagaaagttgctgagttctttggtaaagagccgcgtaaagacgttaacccggacgaagctgtagcaatcggtgctgctgttcagggtggtgttctgactggtgacgtaaaagacgtactgctgctggacgttaccccgctgtctctgggtatcgaaaccatgggcggtgtgatgacgacgctgatcgcgaaaaacaccactatcccgaccaagcacagccaggtgttctctaccgctgaagacaaccagtctgcggtaaccatccatgtgctgcagggtgaacgtaaacgtgcggctgataacaaatctctgggtcagttcaacctagatggtatcaacccggcaccgcgcggcatgccgcagatcgaagttaccttcgatatcgatgctgacggtatcctgcacgtttccgcgaaagataaaaacagcggtaaagagcagaagatcaccatcaaggcttcttctggtctgaacgaagatgaaatccagaaaatggtacgcgacgcagaagctaacgccgaagctgaccgtaagtttgaagagctggtacagactcgcaaccagggcgaccatctgctgcacagcacccgtaagcaggttgaagaagcaggcgacaaactgccggctgacgacaaaactgctatcgagtctgcgctgactgcactggaaactgctctgaaaggtgaagacaaagccgctatcgaagcgaaaatgcaggaactggcacaggtttcccagaaactgatggaaatcgcccagcagcaacatgcccagcagcagactgccggtgctgatgcttctgcaaacaacgcgaaagatgacgatgttgtcgacgctgaatttgaagaagtcaaagacaaaaaataatcgccctataaacgggtaattatactgacacgggcgaaggggaatttcctctccgcccgtgcattcatctaggggcaatttaaaaaagatggctaagcaagattattacgagattttaggcgtttccaaaacagcggaagagcgtgaaatcagaaaggcctacaaacgcctggccatgaaataccacccggaccgtaaccagggtgacaaagaggccgaggcgaaatttaaagagatcaaggaagcttatgaagttctgaccgacagccaaaaacgtgcggcatacgatcagtatggtcatgctgcgtttgagcaaggtggcatgggcggcggcggttttggcggcggcgcagacttcagcgatatttttggtgacgttttcggcgatatttttggcggcggacgtggtcgtcaacgtgcggcgcgcggtgctgatttacgctataacatggagctcaccctcgaagaagctgtacgtggcgtgaccaaagagatccgcattccgactctggaagagtgtgacgtttgccacggtagcggtgcaaaaccaggtacacagccgcagacttgtccgacctgtcatggttctggtcaggtgcagatgcgccagggattcttcgctgtacagcagacctgtccacactgtcagggccgcggtacgctgatcaaagatccgtgcaacaaatgtcatggtcatggtcgtgttgagcgcagcaaaacgctgtccgttaaaatcccggcaggggtggacactggagaccgcatccgtcttgcgggcgaaggtgaagcgggcgagcatggcgcaccggcaggcgatctgtacgttcaggttcaggttaaacagcacccgattttcgagcgtgaaggcaacaacctgtattgcgaagtcccgatcaacttcgctatggcggcgctgggtggcgaaatcgaagtaccgacccttgatggtcgcgtcaaactgaaagtgcctggcgaaacccagaccggtaagctattccgtatgcgcggtaaaggcgtcaagtctgtccgcggtggcgcacagggtgatttgctgtgccgcgttgtcgtcgaaacaccggtaggcctgaacgaaaggcagaaacagctgctgcaagagctgcaagaaagcttcggtggcccaaccggcgagcacaacagcccgcgcagtaagagcttctttgatggtgtgaagaagttttttgacgacctgacccgctaacctccccaaaagcctgcccgtgggcaggcctgggtaaaaatagggtgcgttgaagatatgcgagcacctgtaaagtggcggggatcactctacctcaatgtgtatcacaatatccatattctttgtgggggagtctggagattgagtagatattcttgttcagaatgtatcagccgatggttctacgattcttaagccacgaagagttcagatagtacaacggcatgtctcttttgactatctggcaaccggcagtgtgttctctcacgcatcacaaaagcagcaggcataaaaaaacccgcttgcgcgggctttttcacaaagcttcagcaaattggcgattaagccagtttgttgatctgtgcagtcaggttagccttatgacgtgcagctttgtttttgtggatcagacctttagcagcctgacggtccacgatcggttgcatttcgttaaatgctttctgtgcagcagctttgtcgccagcttcgatagctgcgtatactttcttgatgaaagtacgcatcatagagcgacggcttgcgttgtgcttacgagccttttcagactgaatggcgcgcttcttagcacttttgatattagccaaggtccaactcccaaatgtgttctatatggacaattcaaaggccgaggaatatgcccttttagccttcttttgtcaatggatttgtgcaaataagcgccgttaatgtgccggcacagcttacgtagtgatggcgcaggattctaccagcttgcggggtgtgaatacagcttttccgcgataaaaattgcagcaggcggtcagtttcttcccgtgatttgcgccatggcaatgaaaagccacttctttctgattagcgtactcaatcgccggttaaccttgaccgctgtacaaggtatactcggacgatttagcctgttttgagccagacatgaagctgatacgcggcatacataatctcagccaggccccgcaagaagggtgtgtgctgactattggtaatttcgacggcgtgcatcgcggtcatcgcgcgctgttacagggcttgcaggaagaagggcgcaagcgcaacttaccggtgatggtgatgctttttgaacctcaaccactggaactgtttgctaccgataaagccccggcaagactgacccggctgcgggaaaaactgcgttaccttgcagagtgtggcgttgattacgtgctgtgcgtgcgtttcgacaggcgtttcgcggcgttaaccgcgcaaaatttcatcagcgatcttctggtgaagcatttgcgcgtaaaatttcttgccgtaggtgatgatttccgctttggcgctggtcgtgaaggcgatttcttgttattacagaaagctggcatggaatacggcttcgatatcaccagtacgcaaactttttgcgaaggtggcgtgcgcatcagcagcaccgccgtgcgtcaggcccttgcggatgacaatctggctctggcagagagtttactggggcacccgtttgccatctccgggcgtgtagtccacggtgatgaattagggcgcactataggtttcccgacggcgaatgtaccgctgcgccgtcaggtttccccggtgaaaggggtttatgcggtagaagtgctgggcctcggtgaaaagccgttacccggcgtggcaaacatcggaacacgcccaacggttgccggtattcgccagcagctggaagtgcatttgttagatgttgcaatggacctttacggtcgccatatacaagtagtgctgcgtaaaaaaatacgcaatgagcagcgatttgcgagcctggacgaactgaaagcgcagattgcgcgtgatgaattaaccgcccgcgaattttttgggctaacaaaaccggcttaagcctgttatgtaatcaaaccgaaatacggaaccgagaatctgatgagtgactataaaagtaccctgaatttgccggaaacagggttcccgatgcgtggcgatctcgccaagcgcgaacccggaatgctggcgcgttggactgatgatgatctgtacggcatcatccgtgcggctaaaaaaggcaaaaaaaccttcattctgcatgatggccctccttatgcgaatggcagcattcatattggtcacagcgttaacaagattctgaaagacattatcgtgaagtccaaagggctttccggttatgacagcccgtatgtgcctggctgggactgccacggtctgccgatcgagctgaaagtcgagcaagaatacggtaagccgggtgagaaattcaccgccgccgagttccgcgccaagtgccgcgaatacgcggcgacccaggttgacggtcaacgcaaagactttatccgtctgggcgtgctgggcgactggagccacccgtacctgaccatggacttcaaaactgaagccaacatcatccgcgcgctgggcaaaatcatcggcaacggtcacctgcacaaaggcgcgaagccagttcactggtgcgttgactgccgttctgcgctggcggaagcggaagttgagtattacgacaaaacttctccgtccatcgacgttgctttccaggcagtcgatcaggatgcactgaaagcaaaatttgccgtaagcaacgttaacggcccaatcagcctggtaatctggaccaccacgccgtggactctgcctgccaaccgcgcaatctctattgcaccagatttcgactatgcgctggtgcagatcgacggtcaggccgtgattctggcgaaagatctggttgaaagcgtaatgcagcgtatcggcgtgaccgattacaccattctcggcacggtaaaaggtgcggagcttgagctgctgcgctttacccatccgtttatgggcttcgacgttccggcaatcctcggcgatcacgttaccctggatgccggtaccggtgccgttcacaccgcgcctggccacggcccggacgactatgtgatcggtcagaaatacggcctggaaaccgctaacccggttggcccggacggcacttatctgccgggcacttatccgacgctggatggcgtgaacgtcttcaaagcgaacgacatcgtcgttgcgctgctgcaggaaaaaggcgcgctgctgcacgttgagaaaatgcagcacagctatccgtgctgctggcgtcacaaaacgccgatcatcttccgcgcgacgccgcagtggttcgtcagcatggatcagaaaggtctgcgtgcgcagagtctgaaagagatcaaaggcgtgcagtggatcccggactggggccaggcgcgtatcgagagcatggttgctaaccgtcctgactggtgtatctcccgtcagcgcacctggggtgtaccgatgagtctgttcgtgcacaaagacacggaagagctgcatccgcgtacccttgaactgatggaagaagtggcaaaacgcgttgaagtcgatggcatccaggcgtggtgggatctcgatgcgaaagagatcctcggcgacgaagctgatcagtacgtgaaagtgccggacacattggatgtatggtttgactccggatctacccactcttctgttgttgacgtgcgtccggaatttgccggtcacgcagcggacatgtatctggaaggttctgaccaacaccgcggctggttcatgtcttccctaatgatctccaccgcgatgaagggtaaagcgccgtatcgtcaggtactgacccacggctttaccgtggatggtcagggccgcaagatgtctaaatccatcggcaataccgttagcccgcaggatgtgatgaacaaactgggcgcggatattctgcgtctgtgggtggcaagtaccgactacaccggtgaaatggccgtttctgacgagatcctgaaacgtgctgccgatagctatcgtcgtatccgtaacaccgcgcgcttcctgctggcaaacctgaacggttttgatccagcaaaagatatggtgaaaccggaagagatggtggtactggatcgctgggccgtaggttgtgcgaaagcggcacaggaagacatcctcaaggcgtacgaagcatacgatttccacgaagtggtacagcgtctgatgcgcttctgctccgttgagatgggttccttctacctcgacatcatcaaagaccgtcagtacaccgccaaagcggacagtgtggcgcgtcgtagctgccagactgcgctatatcacatcgcagaagcgctggtgcgctggatggcaccaatcctctccttcaccgctgatgaagtgtggggctacctgccgggcgaacgtgaaaaatacgtcttcaccggtgagtggtacgaaggcctgtttggcctggcagacagtgaagcgatgaacgatgcgttctgggacgagctgttgaaagtgcgtggcgaagtgaacaaagtcattgagcaagcgcgtgccgacaagaaagtgggtggcagcctggaagcggcagtaaccttgtatgcagaaccggaactgagcgcgaaactgaccgcgctgggcgatgaattacgatttgtcctgttgacctccggcgctaccgttgcagactataacgacgcacctgctgatgctcagcagagcgaagtactcaaagggctgaaagtcgcgttgagtaaagccgaaggtgagaagtgcccacgctgctggcactacacccaggatgtcggcaaggtggcggaacacgcagaaatctgcggccgctgtgtcagcaacgtcgccggtgacggtgaaaaacgtaagtttgcctgatgagtcaaagcatctgtagtacagggctacgctggctgtggctggtggtagtcgtgctgattatcgatctgggcagcaaatacctgatcctccagaactttgctctgggggatacggtcccgctgttcccgagccttaatctgcattatgcgcgtaactatggcgcggcgtttagtttccttgccgatagcggcggctggcagcgttggttctttgccggtattgcgattggtattagcgtgatcctggcagtgatgatgtatcgcagcaaggccacgcagaagctaaacaatatcgcttacgcgctgattattggcggcgcgctgggcaacctgttcgaccgcctgtggcacggcttcgttgtcgatatgatcgacttctacgtcggcgactggcacttcgccaccttcaaccttgccgatactgccatctgtgtcggtgcggcactgattgtgctggaaggttttttgccttctagagcgaaaaaacaataataaaccctgccggatgcgatgctgacgcatcttatccggcctacagattgctgcgaaatcgtaggccggataaggcgtttacgccgcatccggcaaaaatccttaaatataagagcaaacctgcatgtctgaatctgtacagagcaatagcgccgtcctggtgcacttcacgctaaaactcgacgatggcaccaccgccgagtctacccgcaacaacggtaaaccggcgctgttccgcctgggtgatgcttctctttctgaagggctggagcaacacctgttggggctgaaagtgggcgataaaaccaccttcagcttggagccagatgcggcgtttggcgtgccgagtccggacctgattcagtacttctcccgccgtgaatttatggatgcaggcgagccagaaattggcgcaatcatgctttttaccgcaatggatggcagtgagatgcctggcgtgatccgcgaaattaacggcgactccattaccgttgatttcaaccatccgctggccgggcagaccgttcattttgatattgaagtgctggaaatcgatccggcactggaggcgtaacatgcagatcctgttggccaacccgcgtggtttttgtgccggggtagaccgcgctatcagcattgttgaaaacgcgctggccatttacggcgcaccgatatatgtccgtcacgaagtggtacataaccgctatgtggtcgatagcttgcgtgagcgtggggctatctttattgagcagattagcgaagtaccggacggcgcgatcctgattttctccgcacacggtgtttctcaggcggtacgtaacgaagcaaaaagtcgcgatttgacggtgtttgatgccacctgtccgctggtgaccaaagtgcatatggaagtcgcccgcgccagtcgccgtggcgaagaatctattctcatcggtcacgccgggcacccggaagtggaagggacaatgggccagtacagtaacccggaagggggaatgtatctggtcgaaagcccggacgatgtgtggaaactgacggtcaaaaacgaagagaagctctcctttatgacccagaccacgctgagcgtggatgacacgtctgatgtgatcgacgcgctgcgtaaacgcttcccgaaaattgtcggtccgcgcaaagatgacatctgctacgccacgactaaccgtcaggaagcggtacgcgccctggcagaacaggcggaagttgtgttggtggtcggtagcaaaaactcctccaactccaaccgtctggcggagctggcccagcgtatgggcaaacgcgcgtttttgattgacgatgcgaaagacatccaggaagagtgggtgaaagaggttaaatgcgtcggcgtgactgcgggcgcaagcgctccggatattctggtgcagaatgtggtggcacgtttgcagcagctgggcggtggtgaagccattccgctggaaggccgtgaagaaaacattgttttcgaagtgccgaaagagctgcgtgtcgatattcgtgaagtcgattaagtcattagcagcctaagttatgcgaaaatgccggtcttgttaccggcattttttatggagaaaacatgcgtttacctatcttcctcgatactgaccccggcattgacgatgccgtcgccattgccgccgcgatttttgcacccgaactcgacctgcaactgatgaccaccgtcgcgggtaatgtcagcgttgagaaaactacccgcaatgccctgcaactgctgcatttctggaatgcggagattccgctcgcccaaggggccgctgtgccactggtacgcgcaccgcgtgatgcggcatctgtgcacggcgaaagcggaatggctggctacgactttgttgagcacaaccgaaagccgctcgggataccggcgtttctggcgattcgggatgccctgatgcgtgcaccagagcctgttaccctggtggccatcggcccgttaaccaatattgcgctgttacttagtcaatgcccggaatgcaagccgtatattcgccgtctggtgatcatgggtggttctgccggacgcggcaactgtacgccaaacgccgagtttaatattgctgccgatccagaagctgctgcctgtgtcttccgcagtggtattgaaatcgtcatgtgcggtttggatgtcaccaatcaggcaatattaactcctgactatctctctacactgccgcagttaaaccgtaccgggaaaatgcttcacgccctgtttagccactaccgtagcggcagtatgcaaagcggcttgcgaatgcacgatctctgcgccatcgcctggctggtgcgcccggacctgttcactctcaaaccctgttttgtggcagtggaaactcagggcgaatttaccagtggcacgacggtggttgatatcgacggttgcctgggcaagccagccaatgtacaggtggcattggatctggatgtgaaaggcttccagcagtgggtggctgaggtgctggctctggcgagctaacctgtcacatgttattggcatgcagtcattcatcgactcatgcctttcactgatatccctccctgtttatcattaatttctaattatcagcgtttttggctggcggcgtagcgatgcgctggttactctgaaaacggtctatgcaaattaacaaaagagaatagctatgcatgatgcaaacatccgcgttgccatcgcgggagccggggggcgtatgggccgccagttgattcaggcggcgctggcattagagggcgtgcagttgggcgctgcgctggagcgtgaaggatcttctttactgggcagcgacgccggtgagctggccggagccgggaaaacaggcgttaccgtgcaaagcagcctcgatgcggtaaaagatgattttgatgtgtttatcgattttacccgtccggaaggtacgctgaaccatctcgctttttgtcgccagcatggcaaagggatggtgatcggcactacggggtttgacgaagccggtaaacaagcaattcgtgacgccgctgccgatattgcgattgtctttgctgccaattttagcgttggcgttaacgtcatgcttaagctgctggagaaagcagccaaagtgatgggtgactacaccgatatcgaaattattgaagcacatcatagacataaagttgatgcgccgagtggcaccgcactggcaatgggagaggcgatcgcccacgcccttgataaagatctgaaagattgcgcggtctacagtcgtgaaggccacaccggtgaacgtgtgcctggcaccattggttttgccaccgtgcgtgcaggtgacatcgttggtgaacataccgcgatgtttgccgatattggcgagcgtctggagatcacccataaggcgtccagccgtatgacatttgctaacggcgcggtaagaagcgctttgtggttgagtggtaaggaaagcggtctttttgatatgcgagatgtacttgatctcaataatttgtaaccacaaaatatttgttatggtgcaaaaataacacatttaatttattgattataaagggctttaatttttggcccttttatttttggtgttatgtttttaaattgtctataagtgccaaaaattacatgttttgtcttctgtttttgttgttttaatgtaaattttgaccatttggtccacttttttctgctcgtttttatttcatgcaatcttcttgctgcgcaagcgttttccagaacaggttagatgatctttttgtcgcttaatgcctgtaaaacatgcatgagccacaaaataatataaaaaatcccgccattaagttgacttttagcgcccatatctccagaatgccgccgtttgccagaaattcgtcggtaagcagatttgcattgatttacgtcatcattgtgaattaatatgcaaataaagtgagtgaatattctctggagggtgttttgattaagagtgcgctattggttctggaagacggaacccagtttcacggtcgggccataggggcaacaggtagcgcggttggggaagtcgttttcaatactagtatgaccggttatcaagaaatcctcactgatccttcctattctcgtcaaatcgttactcttacttatccccatattggcaatgtcggcaccaatgacgccgatgaagaatcttctcaggtacatgcacaaggtctggtgattcgcgacctgccgctgattgccagcaacttccgtaataccgaagacctctcttcttacctgaaacgccataacatcgtggcgattgccgatatcgatacccgtaagctgacgcgtttactgcgcgagaaaggcgcacagaatggctgcattatcgcgggcgataacccggatgcggcgctggcgttagaaaaagcccgcgcgttcccaggtctgaatggcatggatctggcaaaagaagtgaccaccgcagaagcctatagctggacacaagggagctggacgttgaccggtggcctgccagaagcgaaaaaagaagacgagctgccgttccacgtcgtggcttatgattttggtgccaagcgcaacatcctgcggatgctggtggatagaggctgtcgcctgaccatcgttccggcgcaaacttctgcggaagatgtgctgaaaatgaatccagacggcatcttcctctccaacggtcctggcgacccggccccgtgcgattacgccattaccgccatccagaaattcctcgaaaccgatattccggtattcggcatctgtctcggtcatcagctgctggcgctggcgagcggtgcgaagactgtcaaaatgaaatttggtcaccacggcggcaaccatccggttaaagatgtggagaaaaacgtggtaatgatcaccgcccagaaccacggttttgcggtggacgaagcaacattacctgcaaacctgcgtgtcacgcataaatccctgttcgacggtacgttacagggcattcatcgcaccgataaaccggcattcagcttccaggggcaccctgaagccagccctggtccacacgacgccgcgccgttgttcgaccactttatcgagttaattgagcagtaccgtaaaaccgctaagtaatcaggagtaaaagagccatgccaaaacgtacagatataaaaagtatcctgattctgggtgcgggcccgattgttatcggtcaggcgtgtgagtttgactactctggcgcgcaagcgtgtaaagccctgcgtgaagagggttaccgcgtcattctggtgaactccaacccggcgaccatcatgaccgacccggaaatggctgatgcaacctacatcgagccgattcactgggaagttgtacgcaagattattgaaaaagagcgcccggacgcggtgctgccaacgatgggcggtcagacggcgctgaactgcgcgctggagctggaacgtcagggcgtgttggaagagttcggtgtcaccatgattggtgccactgccgatgcgattgataaagcagaagaccgccgtcgtttcgacgtagcgatgaagaaaattggtctggaaaccgcgcgttccggtatcgcacacacgatggaagaagcgctggcggttgccgctgacgtgggcttcccgtgcattattcgcccatcctttaccatgggcggtagcggcggcggtatcgcttataaccgtgaagagtttgaagaaatttgcgcccgcggtctggatctctctccgaccaaagagttgctgattgatgagagcctgatcggctggaaagagtacgagatggaagtggtgcgtgataaaaacgacaactgcatcatcgtctgctctatcgaaaacttcgatgcgatgggcatccacaccggtgactccatcactgtcgcgccagcccaaacgctgaccgacaaagaatatcaaatcatgcgtaacgccagcatggcggtgctgcgtgaaatcggcgttgaaaccggtggttccaacgttcagtttgcggtgaacccgaaaaacggtcgtctgattgttatcgaaatgaacccacgcgtgtcccgttctagcgcgctggcgagcaaagcgaccggtttcccgattgctaaagtggcggcgaaactggcggtgggttacaccctcgacgaactgatgaacgacatcactggcggacgtactccggcctccttcgagccgtccatcgactatgtggttactaaaattcctcgcttcaacttcgaaaaattcgccggtgctaacgaccgtctgaccactcagatgaaaagcgttggcgaagtgatggcgattggtcgcacgcagcaggaatccctgcaaaaagcgctgcgcggcctggaagtcggtgcgactggattcgacccgaaagtgagcctggatgacccggaagcgttaaccaaaatccgtcgcgaactgaaagacgcaggcgcagatcgtatctggtacatcgccgatgcgttccgtgcgggcctgtctgtggacggcgtcttcaacctgaccaacattgaccgctggttcctggtacagattgaagagctggtgcgtctggaagagaaagtggcggaagtgggcatcactggcctgaacgctgacttcctgcgccagctgaaacgcaaaggctttgccgatgcgcgcttggcaaaactggcgggcgtacgcgaagcggaaatccgtaagctgcgtgaccagtatgacctgcacccggtttataagcgcgtggatacctgtgcggcagagttcgccaccgacaccgcttacatgtactccacttatgaagaagagtgcgaagcgaatccgtctaccgaccgtgaaaaaatcatggtgcttggcggcggcccgaaccgtatcggtcagggtatcgaattcgactactgttgcgtacacgccagcctggcgctgcgcgaagacggttacgaaaccattatggttaactgtaacccggaaaccgtctccaccgactacgacacttccgaccgcctctacttcgagccggtaactctggaagatgtgctggaaatcgtgcgtatcgagaagccgaaaggcgttatcgtccagtacggcggtcagaccccgctgaaactggcgcgcgcgctggaagctgctggcgtaccggttatcggcaccagcccggatgctatcgaccgtgcagaagaccgtgaacgcttccagcatgcggttgagcgtctgaaactgaaacaaccggcgaacgccaccgttaccgctattgaaatggcggtagagaaggcgaaagagattggctacccgctggtggtacgtccgtcttacgttctcggcggtcgggcgatggaaatcgtctatgacgaagctgacctgcgtcgctacttccagacggcggtcagcgtgtctaacgatgcgccagtgttgctggaccacttcctcgatgacgcggtagaagttgacgtggatgccatctgcgacggcgaaatggtgctgattggcggcatcatggagcatattgagcaggcgggcgtgcactccggtgactccgcatgttctctgccagcctacaccttaagtcaggaaattcaggatgtgatgcgccagcaggtgcagaaactggccttcgaattgcaggtgcgcggcctgatgaacgtgcagtttgcggtgaaaaacaacgaagtctacctgattgaagttaacccgcgtgcggcgcgtaccgttccgttcgtctccaaagccaccggcgtaccgctggcaaaagtggcggcgcgcgtgatggctggcaaaagcctggctgagcagggcgtaaccaaagaagttatcccgccgtactacagcgtgaaagaagtggtgctgccgttcaataaattcccgggcgttgacccgctgttagggccagaaatgcgctctaccggggaagtcatgggcgtgggccgcaccttcgctgaagcgtttgccaaagcgcagctgggcagcaactccaccatgaagaaacacggtcgtgcgctgctttccgtgcgcgaaggcgataaagaacgcgtggtggacctggcggcaaaactgctgaaacagggcttcgagctggatgcgacccacggcacggcgattgtgctgggcgaagcaggtatcaacccgcgtctggtaaacaaggtgcatgaaggccgtccgcacattcaggaccgtatcaagaatggcgaatatacctacatcatcaacaccaccagtggccgtcgtgcgattgaagactcccgcgtgattcgtcgcagtgcgctgcaatataaagtgcattacgacaccaccctgaacggcggctttgccaccgcgatggcgctgaatgccgatgcgactgaaaaagtaattagcgtgcaggaaatgcacgcacagatcaaataatagcgtgtcatggcagatatttttcatccgctaatttgatcgaataactaatacggttctctgatgaggaccgtttttttttgcccattaagtaaatcttttggggaatcgatatttttgatgacataagcaggatttagctcacacttatcgacggtgaagttgcatactatcgatatatccacaattttaatatggccttgtttaattgcttcaaaacgagtcatagccagacttttaatttgtgaaactggagttcgtatgtgtgaaggatatgttgaaaaaccactctacttgttaatcgccgaatggatgatggctgaaaatcggtgggtgatagcaagagagatctctattcatttcgatattgaacacagcaaggcggttaataccctgacttatattctgagcgaagtcacagaaataagctgcgaagttaagatgatccctaataagctggaagggcggggatgccagtgtcagcgactggttaaagtggtcgatatcgatgagcaaatttacgcgcgcctgcgcaataacagtcgggaaaaattagtcggtgtaagaaagacgccgcgtattcctgccgttccgctcacggaacttaaccgcgagcagaagtggcagatgatgttgagtaagagtatgcgtcgttaattttatctcgttgataccgggcgtcctgcttgccagatgcgatgttgtagcatcttatccagcaaccaggtcgcatccggcaagatcaccgtttaggcgtcacatccgtcgtcccctgcaaacgggggcgattttcctccatttgcctcagtggctgcgtttcatgtaagcttacatgacagcgcccgacaagatcctgatactctttggtattcaaccgtttccagtgtaactcgtcgtcactaacattgcgtacagcgcgggctggcgtacccatcaacaactggcgtttctcgccgcgaaagcccgctttgacaaagctcatggcggcaacaatgctctcttcgccaatgaccgcgccatccataatcacgctgttcatcccgaccaatgcatcgcgaccaatcaaacaaccatgcaggatcgctccgtgcccgatatggccgttttccccaacgatagtgtcagtgtcgcagtagccatgcataatgcagccatcctgaatattggctcccgcttgcacgatcaaccgcccgtagtcaccacgcagactggcgagtgggccgatgtagacaccggctcccacaatcacatcgccaatcaagacggcactgggatggacaaacgccgtcgggtgaaccaccggaattaacccctcaaaggcgtaatagctcacggttgttaacgtcctttccacaccggatcgcgcttctcggcaaacgccagcggcccttcaatggcatcttcgctatgcagaacgcttggatagtgtttcaacacgccgctgcgaatatagcgatacgcttcttctaccggcatttcgctggtggtgcggtagatctctttcagcgccgcaatcgccagcggggcgctgttaaccagctgctgagccagttcgcgggcgttatccatcagttccgcctggctaaccacgcggttgactatcccccaacgcagcgcctcttctgcgcccattcgtctgccggtcatcaccatttcattgacgatggcaggcggcaggatcttcggcagacgcagcacaccgccgctgtcaggaacgatgcccagtttggcttccggcagggcgaagctggcgttatcggcacaaacaataaaatctgccgccagcgccagttcaaagccgccgccaaaggcatagccgttcacagctgcgataaccggtttgtcgagattgaaaatttcggttaatcccgcaaaaccacccggaccaaagtcagcatccggtgcttcgccttctgctgccgcttttaaatcccagcccgcggaaaagaacttctctccggcaccggtaataatggcgacacgtaattgcggatcgtcacggaaatttagaaatacttcgcccatttcaaagctggtttttgcatcaatagcattcgcttttggacgatcaagggtaatttccagaatacttccattgcgggtcagatgtaaactttcactcattccttttctccatttttgctttttcagggagctcaacatccctgcaaaaaatgcatattgttttagagtgtgattattagctggcagggtagttccctgctgtttcatttatttcagattctttctaattattttcccgctgcaattacgtggcagatcttttctgatctccagataagagggcactttaaatttcgccatattttgttcgcagaagcggaaaaattcctcttcgctcaatgtttcaccttcattcagcaccacaaatgctttgatggcttcatcgcgaatgctatctttaatacccacaaccacgatgtcctgaattttcgggtgcgcggcgataatattttccagctccacgcaggagacattctcgccgccacgtttaatcatattgcagcggcgatcgacgaaataaaaaaagtcctcttcgtcgcggtatccggtatcgccggtatgcagccagccatcggcttccagcactttcgcagtggcttgtgggttgagaaagtactctttgaagatggttttcccaggtatgcctttaatgcagatttcaccgatctcaccagccgggagcgggcgattgtgatcgtcgcggatctccgcttcgtagcaaaaccccacccgaccaatgctcggccagcgtcgtttatcgccaggacgatcgccgataatgcccacaatggtttccgtcatcccataagacgtcagcaagcgaacgccgaagcgttcacaaaacgcatctttttcctgctcgctcaagttgagataaaacatcacttcccgcaggcggtgttgctgatcgttcgcactaggcggctgtaccatcaacgtacggatcatcatcggaatacattcggtaacggtggcgcggtacttctgtacctgtccccagaaggcgcgggcgctgtatttctcgaccagcacaaaggtggccccggcagaaaacgccgccatcgccgcagtacactggcaatcgatatgaaacgcaggcattaccgtcaggtagacgtcatcgtcacgcagtgcacactgccaggcggagtaatatccagcgaagcgcaggttgtaatgggtaatcaccacacctttcggtcgggaggtggtgccggaggtgaagagaatttccgccgtatcgtcagtgcttagcggcggtgcatagcacaaggtggcaggttgttgatttttcagttgagtaaagctactcacgccatcatcagcgggaagtgccacatctgtcaggcaaatgtgccgcaattgagtggcatcttcctgctgaatctgttgatacataggatagaattgcgcactggtcaccagcaggcacgcctggctattttgcaggatccacgcgctttcctcgcacaacaggcgggcgttaatcggcaccataatcgcgccaatttttgccagcccgaaccagcaaaagataaattccgggcagttgtcgagatgtagtgcaaccttgtcgcctttgcgaatccccagcgtataaaacaggtttgccgtgcggttaatctcctgatttaactcaagataactataccggttaacgactccgccgctggattcacaaatcagcgccgttttatgaccgtaaacgtccgcaagatcgtcccacatttgacgtagatgttgtccgccaatgatatccattgcacctctatccatttttgttcgtttgttattgggcgggcgctagtcaggcaagccgactgacgccacgcgtttagtcctcaactttggccagacctttgctgaccaactcctgaatgtcgttttcgctgtagccgatatttttcaaaatggcagccgtgtccataccatgactgggcattccgcgccagatttgtccggggttatttttgaatttcggcatgatgttcggccctttgcaggtgcgaccatccatcgtttgccactgagtgatactttcgcgagccacatactgtggattgctttccagttccggtacggtcagcactttggcgcaggcgatattcagttcagcaaagcgttcttttacttccgcgatggtatgtgtcgccagccaggcatcgagtttctcttcaaccagtgggccgtaagggcattcgatacggtggataagctgagtgccttccgggatttctggcgtgccaagcagatgtgcgaggccaatatctttaaagcactcttcaatttgggtaatgcccaccagttccatcacgatgtagccgtcggcacatttatacagaccgcaaccggcgtagtagggatctttacctttgctcatgcgcgggcacatttcgccgccgttgaagtaatccatcatgaagtactggcccatacgcagcatcacttcatacatggcgatgtcgatactttcgcctttaccggtttcacgcactttatgcagtgctgccagcgccgccgtggtggcggtcaggccagaaaagtaatcggcggtatacgggaaggcaggcattggctggtcaacatcaccgttctgaatcaggtaaccactaaaggcctgggcgatagtgttataggccggaagattggtgtactcctcggtgccgtactgaccaaaaccggacaggtgagcgataaccagtttcgggttgtgctgccacagtacttcatcggtaatgccacgacgggcaaaggccggacctttactggcttcgatgaagatatcggtggtttccattaatttcagaaacgcttcgcggccttcatctttgaaaatatttaagctcagcgcgtgcaaattgcggcgggagagttgcgggtagttcggttgaacgcgaatggtgtcggcccaggcgacgttctcgatccagataacttccgcgccccattctgcgaacatttgcccggcaaacggtccggcgatttcgataccggagaagacaacgcgcaatccggccaacggcccgaatttcggcatgggtagatgatccattatttgctcctgaaaaatttatgtagcgcatgactgccggatgcggcgtaaacgctttatccggcctacattcgtgctcccgtaggcctgataagacgcatcagcgtcgcatcaggcagcgcacggacttagcggtattgcttcagcaccgcacgacccagcgtcaggatctgcatttcgtcagatcccccggagacgcggtctacacgcagatcacgccagaagcggctgatgcggtggttgcccgcaatcccgacaccgcccagcacctgcattgcgctatccacaacttcaaatgccgcattggcgcagaagtatttgcacatcgctgcatcgccagaggtgatggtgccgttgtctgctttccacgctgcttcatacagcatgtttttcatggagtttaatttgatcgccatgtgggcgaatttttcctgaatcaactggaaacgaccaatagcctcgccaaactgcacgcgctgattggcgtagcgcgccgcatcttcaaaggcgcacatcgccgtaccgtagttggtgagggctaccaggaaacgttcatggtcgaactcttctttgacgcggttaaagccgttaccttcccgaccgaacatgtctttctcgtccagttccacgtcgtcaaaggtgatttcacagcagctatccatacgcagaccgagcttttcaagtttggtcactttgatgcccggtttgctcatatcaacaaaccattcggtgtagacaggtttgtccggagaagccccgtcgcgcgccatcaccacgatgtacggggtgtaggcgctgctggtaataaaacacttactaccattaagataaatcttaccatttctacgggtataagtcgttttcaggctacccacgtcggagcccgcgcccggttcggtaatcgcactgttccacatctgcttaccggtgccgcggaaagccataattttgtcgatctgctcttgtgtgccttcgcgcaggaaggtgttgaacccgcccggcaactggtacagcacataggttggtgcccccagacgtcccagctccatccacacggcggcgagagtaacaaaccccgcgtccagaccaccgtgctcttcagggatcagcagactgtcgatacccatatccgccagtgctttgacaaaacgttccgggtagacgctgtcacggtcgcactcggcaaaataggcctcccagttttcgctggccatcagttcgcggataccggcgacaaacagttcctgctcatcatttaaattaaaatccatctttcaacctcttgatattttgggggttaattaatctttccagttctgtttcgcgtctttaataaaggagagcgtcaccataatgttgacgaagaacagcgggcatcctccggcgataatggcggtttgaatcggtttcaggccgccgagcgccagcagaacaataccgataatgccaaccagaatactccaaccgatacgcaccagcagaggtggttcttcaccatcgcgtacttcgcggcaagtggacatcgccagggtataagagcaggcgttaaccagcgtaacggtggcaataaagcagaggatgaagaagccccacatggtggcggtgctgagtggcagagcggcccaggtttcaatgatggcgcgcgccacaccgtactgttcgatcagatttggaatgttgatgatgtttttatctatcaacagcagagtgttactaccgagtacagtccacaggatccaggtactcgctgtcagccccagcaccatgccgaagcacagttcacgcacagtacgaccacgggagatgcgggcgaggaagatactcatctggatagcataaatcacccaccatgcccagtagaacacggtccagccctgcgggaagccgcctttagcgatgggatcggtatagaacaacatgcgcggcagatacatcagcaacatccccacgctatcggtgaagtagttcatgatgaagctggcaccgctgacaatgaacacccaacccagcatcaggaagctcaggtaactacgcacgtcactggcgatacgtacccctttttgcagaccgcaagcgacgcaaatggcgttgaggataatccagcaggtaatgatgatagcgtccagttgcagggtatgcggaatgccaaacaaccattgcatacactcggtcaccagcggcgtggcaaggcccagactggtacccatcgcgaagatcaaggcgacgagatagaagttgtcgacgatagtgccgaacaaccctttggcgtgtttttcacctaccagcggcaccagtgtgctgctggggcgaatcacttccattttgcggacaaagaagaagtaagcgaaggcgacactaaggaagctgtaagtggcccacggcagaggtccccagtggaacaagctgtaagccagccccaactctttcgcccctgtgctgttcggttctaagccaaacggcggggtggagatgtagtagtagatctcaatgcttccccagaacagtacggcagcagacgtacaggaggcgaacatcataaagatccaactggcggtgctaaattctggcggttcgttacctaaacgctttttggcatacgggccaaacaccagccagaaccaaccgaaaagcatcaccaccatataccattcaaatgcccatccccatacattggtgacgtaactgaatacagcattaataacgacattcgctgcatccagatctctgactgtaagccaacaaagtatgccgacgattattaacggcggaaagaaaaccttcggttctattcccgtttttctcttttcattcttcatgagttaattccactgtgaaaacgaatatttattttgcgttcccgtttgttttatttttgttaacatttaatataattattattaacctcgtggacgcgttaatggctaactcataatgggtattcaataagctgtattctgtgattggtatcacatttttgtttcgggtgaatagagggcgttttttcgttaattttgattaataatcagtttgttatgctctgttgtgagtaaaaaataacatctgactttcaatattggtgatccataaaacaatattgaaaatttctttttgctacgccgtgttttcaatattggtgaggaacttaacaatattgaaagttggatttatctgcgtgtgacattttcaatattggtgattaaagttttatttcaaaattaaagggcgtgatatctgtaattaacaccaccgatatgaacgacgtttccttcatgatttctggagatgcaatgaagattattacttgctataagtgcgtgcctgatgaacaggatattgcggtcaataatgctgatggtagtttagacttcagcaaagccgatgccaaaataagccaatacgatctcaacgctattgaagcggcttgccagctaaagcaacaggcagcagaggcgcaggtgacagccttaagtgtgggcggtaaagccctgaccaacgccaaagggcgtaaagatgtgctaagccgcggcccggatgaactgattgtggtgattgatgaccagttcgagcaggcactgccgcaacaaacggcgagcgcactggctgcagccgcccagaaagcaggctttgatctgatcctctgtggcgatggttcttccgacctttatgcccagcaggttggtctgctggtgggcgaaatcctcaatattccggcagttaacggcgtcagcaaaattatctccctgacggcagataccctcaccgttgagcgcgaactggaagatgaaaccgaaaccttaagcattccgctgcctgcggttgttgctgtttccactgatatcaactccccacaaattcctagcatgaaagccattctcggcgcggcgaaaaagcccgtccaggtatggagcgcggcggatattggttttaacgcagaggcagcctggagtgaacaacaggttgccgcgccgaaacagcgcgaacgtcagcgcatcgtgattgaaggcgacggcgaagaacagatcgccgcatttgctgaaaatcttcgcaaagtcatttaattacaggggatgctatgaacacgttttctcaagtctgggtattcagcgataccccttctcgtctgccggaactgatgaacggtgcgcaggctttagctaatcaaatcaacacctttgtcctcaatgatgccgacggcgcacaggcaatccagctcggcgctaatcatgtctggaaattaaacggcaaaccggacgatcggatgatcgaagattacgccggtgtcatggctgacactattcgccagcacggcgcagacggcctggtgctgctgccaaacacccgtcgcggcaaattactggcggcaaaactgggttatcgccttaaagcggcggtgtctaacgatgccagcaccgtcagcgtacaggacggtaaagcgacagtgaaacacatggtttacggtggtctggcgattggcgaagaacgcattgccacgccgtatgcggtactgaccatcagcagcggcacgttcgatgcggctcagccagacgcgagtcgcactggcgaaacgcacaccgtggagtggcaggctccggctgtggcgattacccgcacggcaacccaggcgcgccagagcaacagcgtcgatctcgacaaagcccgtctggtggtcagcgtcggtcgcggtattggcagcaaagagaacattgcgctggcagaacagctttgcaaggcgataggtgcggagttggcctgttctcgtccggtggcggaaaacgaaaaatggatggagcacgaacgctatgtcggtatctccaacctgatgctgaaacctgaactgtacctggcggtggggatctccgggcagatccagcacatggttggcgctaacgcgagccaaaccattttcgccatcaataaagataaaaatgcgccgatcttccagtacgcggattacggcattgttggcgacgccgtgaagatccttccggcgctgaccgcagctttagcgcgttgatccactctggcagggctgcattttggccctgccgctgacagggagctcttatgtccgaagatatctttgacgccatcatcgtcggtgcagggcttgccggtagcgttgccgcactggtgctcgcccgcgaaggtgcgcaagtgttagttatcgagcgtggcaattccgcaggtgccaagaacgtcaccggcgggcgtctctatgcccacagtctggaacacattattcctggtttcgccgactccgcccccgtagaacgcctgatcacccatgaaaaactcgcgtttatgacggaaaagagtgcgatgactatggactactgcaatggtgacgaaaccagcccatcccagcgttcttactccgttttgcgcagtaaatttgatgcctggctgatggagcaggccgaagaagcgggcgcgcagttaattaccgggatccgcgtcgataacctcgtacagcgcgatggcaaagtcgtcggtgtagaagccgatggcgatgtgattgaagcgaaaacggtgatccttgctgatggggtgaactccatccttgccgaaaaattggggatggcaaaacgcgtcaaaccgacggatgtggcggttggcgtgaaggaactgatcgagttaccgaagagcgttattgaagaccgttttcagttgcagggtaatcagggggcggcttgcctgtttgcgggaagtcccaccgatggcctgatgggcggcggcttcctttataccaatgaaaacaccctgagcctggggctggtttgtggtttgcatcatctgcatgacgcgaaaaaaagcgtgccgcaaatgctggaagatttcaaacagcatccggccgttgcaccgctgatcgcgggcggcaagctggtggaatattccgctcacgtagtgccggaagcaggcatcaacatgctgccggagttggttggtgacggcgtattgattgccggtgatgccgccggaatgtgtatgaacctcggttttaccattcgcggtatggatctggcgattgccgccggggaagccgcagcaaaaaccgtgcttagtgcgatgaaaagcgacgatttcagtaagcaaaaactggcggaatatcgtcagcatcttgagagtggtccgctgcgcgatatgcgtatgtaccagaaactaccggcgttccttgataacccacgcatgtttagcggctacccggagctggcggtgggtgtggcgcgtgacctgttcaccattgatggcagcgcgccggaactgatgcgcaagaaaatcctccgccacggcaagaaagtgggcttcatcaatctaatcaaggatggcatgaaaggagtgaccgttttatgacttctcccgtcaatgtggacgtcaaactgggcgtcaataaattcaatgtcgatgaagagcatccgcacattgttgtgaaggccgatgctgataaacaggcgctggagctgctggtgaaagcgtgccccgcaggtctgtacaagaagcaggatgacggcagtgtgcgcttcgattacgccggatgtctggagtgcggcacctgtcgcattctggggctggggagcgcgctggaacagtgggaatacccgcgcggcacctttggtgtggagttccgttacggctgatgttggtttgatacgtaacgccgcactgactctcattgcaaaaaacaggaataaccatgcaaccgtccagaaactttgacgatctcaaattctcctctattcaccgccgcattttgctgtggggaagcggtggtccgtttctggatggttatgtactggtaatgattggcgtggcgctggagcaactgacgccggcgctgaaactggacgctgactggattggcttgctgggcgcgggaacgctcgccgggctgttcgttggcacaagcctgtttggttatatttccgataaagtcggacggcgcaaaatgttcctcattgatatcatcgccatcggcgtgataagcgtggcgacgatgtttgttagttcccccgtcgaactgttggtgatgcgggtacttatcggcattgtcatcggtgcagattatcccatcgccaccagtatgatcaccgagttctccagtacccgtcagcgggcgttttccatcagctttattgccgcgatgtggtatgtcggcgcgacctgtgccgatctggtcggctactggctttatgatgtggaaggcggctggcgctggatgctgggtagcgcggcgatcccctgtttgttgattttgattggtcgattcgaactgcctgaatctccccgctggttattacgcaaagggcgagtaaaagagtgcgaagagatgatgatcaaactgtttggcgaaccggtggctttcgatgaagagcagccgcagcaaacccgttttcgcgatctgtttaatcgccgccattttccttttgttctgtttgttgccgccatctggacctgccaggtgatcccaatgttcgccatttacacctttggcccgcaaatcgttggtttgttgggattgggggttggcaaaaacgcggcactagggaatgtggtgattagcctgttctttatgctcggctgtattccgccgatgctgtggttaaacactgccggacggcgtccattgttgattggcagctttgccatgatgacgctggcgctggcggttttggggctaatcccggatatggggatctggctggtagtgatggcctttgcggtgtatgcctttttctctggcgggccgggtaatttgcagtggctctatcctaatgaactcttcccgacagatatccgcgcctctgccgtgggcgtgattatgtccttaagtcgtattggcaccattgttagcacctgggcactaccgatctttatcaataattacggtatcagtaacacgatgctaatgggggcgggtatcagcctgtttggcttgttgatttccgtagcgtttgccccggagactcgagggatgagtctggcgcagaccagcaatatgacgatccgcgggcagagaatggggtaaattgttcagatttctctcttttctgaatcaatattattgactataagccgcgtgaatatatgactacactttgtgggaaaacaaaggcgtaatcacgcgggctacctatgattcttataatttatgcgcatccgtatccgcatcattcccatgcgaataaacggatgcttgaacaggcaaggacgctggaaggcgtcgaaattcgctctctttatcaactctatcctgacttcaatatcgatattgccgccgagcaggaggcgctgtctcgcgccgatctgatcgtctggcagcatccgatgcagtggtacagcattcctccgctcctcaaactttggatcgataaagttttctcccacggctgggcttacggtcatggcggcacggcgctgcatggcaaacatttgctgtgggcggtgacgaccggcggcggggaaagccattttgaaattggtgcgcatccgggctttgatgtgctgagccagccgctacaggcgacggcaatctactgcgggctgaactggctgccaccgtttgccatgcactgcacctttatttgtgacgacgaaaccctcgaagggcaggcgcgtcactataagcaacgtctgctggaatggcaggaggcccatcatggataattaaggaatggcaggaggcccatcatggatagccatacgctgattcaggcgctgatttatctcggtagcgcagcgctgattgtacccattgcggtacgtcttggtctgggaagcgtacttggctacctgatcgccggctgcattattggcccgtgggggctgcgactggtgaccgatgccgaatctattctgcactttgccgagattggggtggtgctgatgctgtttattatcggcctcgaactcgatccacaaaggctgtggaagctgcgtgcggcagtgttcggctgtggcgcattgcagatggtgatttgcggcggcctgctggggctgttctgcatgttacttgggctgcgctggcaggtcgcggaattgatcggcatgacgctggcgctctcctctacggcgattgccatgcaggcgatgaatgaacgcaatctgatggtgacgcaaatgggtcgcagtgcctttgcggtgctgctgttccaggatatcgcggcgatcccgctggtggcgatgattccgctactggcaacgagcagtgccagcacgacgatgggcgcatttgctctcagcgcgttaaaagtggcgggtgcgctggtgctggtggtattgctggggcgctatgtcacgcgtccggcgctgcgttttgtagcccgctctggcttgcgggaagtgtttagtgccgtggcgttattcctcgtgtttggctttggtttgctgctggaagaggtcggcttgagcatggcgatgggcgcgtttctggcgggcgtactgctggcaagcagcgaataccgtcatgcgctggagagcgatatcgaaccatttaaaggtttgctgttggggctgtttttcatcggtgttggcatgagcatagactttggcacgctgcttgaaaacccattgcgcattgtcattttgctgctcggtttcctcatcatcaaaatcgccatgctgtggctgattgcccgaccgttgcaagtgccaaataaacagcgtcgttggtttgcggtgttgttagggcagggcagtgagtttgcctttgtggtatttggcgcggcgcagatggcgaatgtgctggagccggagtgggcgaaaagcctgaccctggcggtggcgctgagcatggcagcaacgccgattctgctggtgatcctcaatcgccttgagcaatcttctactgaggaagcgcgtgaagccgatgagatcgacgaagaacagccgcgcgtgattatcgccggattcggtcgttttgggcagattaccggacgtttactgctctccagcggggtgaaaatggtggtactcgatcacgatccggaccatatcgaaaccttgcgtaaatttggtatgaaagtgttttatggcgatgccacgcggatggatttactggaatctgccggagcggcgaaagcggaagtgctgattaacgccatcgacgatccgcaaaccaacctgcaactgacagagatggtgaaagaacatttcccgcatttgcagattattgcccgcgcccgcgatgtcgaccactacattcgtttgcgtcaggcaggcgttgaaaagccggagcgtgaaaccttcgaaggtgcgctgaaaaccgggcgtctggcactggaaagtttaggtctggggccgtatgaagcgcgagaacgtgccgatgtgttccgccgctttaatattcagatggtggaagagatggcaatggttgagaacgacaccaaagcccgcgcggcggtctataaacgcaccagcgcgatgttaagtgagatcattaccgaggaccgcgaacatctgagtttaattcaacgacatggctggcagggaaccgaagaaggtaaacataccggcaacatggcggatgaaccggaaacgaaacccagttcctaataaagagtgacgtaaatcacactttacagctaactgtttgtttttgtttcattgtaatgcggcgagtccagggagagagcgtggactcgccagcagaatataaaattttcctcaacatcatcctcgcaccagtcgacgacggtttacgctttacgtatagtggcgacaattttttttatcgggaaatctcaatgatcagtctgattgcggcgttagcggtagatcgcgttatcggcatggaaaacgccatgccgtggaacctgcctgccgatctcgcctggtttaaacgcaacaccttaaataaacccgtgattatgggccgccatacctgggaaagtatcggtcgtccgttgccaggacgcaaaaatattatcctcagcagtcaaccgggtacggacgatcgcgtaacgtgggtgaagagcgtggatgaagccatcgcggcgtgtggtgacgtaccagaaatcatggtgattggcggcggtcgcgtttatgaacagttcttgccaaaagcgcaaaaactgtatctgacgcatatcgacgcagaagtggaaggcgacacccatttcccggattacgagccggatgactgggaaagcgtattcagcgaattccacgatgctgatgcgcagaactctcacagctattgctttgagattctggagcggcggtaattttgtatagaatttacggctagcgccggatgcgacgccggtcgcgtcttatccggccttcctatatcaggctgtgtttaagacgccgccgcttcgcccaaatccttatgccggttgctcggctggacaaaatactgtttatcttcccagcgcaggcaggttaatgtaccaccccagcagcagccggtatccagcgcgtatataccttccggcgtacctttgccctccaggcttgcccagtgaccaaaggcgatgctgtattcttcagcgacagggccaggaatcgcaaaccacggtttcagtggggcaggggcctcttccgggctttctttgctgtacatatccagttgaccgttcgggaagcaaaaacgcatacgggtaaaagcgttggtgataaaacgcagtcttcccagcccccgcaattccggactccagttatttggcatatcgccgtacatggcatcaagaaagaagggataggagtcactgcttagcaccgcttctacatcgcgtgcgcactctttggcggtctgcagatcccactgcggcgtgatccctgcgtgggccatcaccagctttttctcttcgtcgatttgcagcagaggctggcgccgcagccagttaagcagctcgtcggcatccggcgcttccagcagcggtgtcaggcgatctttcggtttattgcggctgatcccggcaaataccgccagcagatgcagatcgtgattgcccagcaccagacgtacgctgtcgcctaaggatttcacatagcgcagaacatccaggctacccggcccgcgcgcgaccagatcgcccgtcagccagagggtatctttcccaggggtaaattctactttatgcagcaatgcgatcagttcatcgtaacaaccatgaacgtcgccaataaggtatgtcgccatattcttttaatgaatgagtgtgggaacggcgagtcggaatacgggaatgtcgatgctgaaagggacgccattttcatcgatcatttcgtagtgaccctgcatggtgcccagcggggtttcaatgattgcaccgctggtgtactggtactcttcgccaggcgcgataagtggctggacgccaaccactccttcgccctggacttcggtttcacggccattgccattggtgatcagccagtaacgccccaacaactgcactggcgctcgccccagattgcgtatggttacggtataagcaaaaacgtaacgttcattatcaggactagattgagcctcaatgtagacgctttgaacctgaatacacactcgggggctattgatcatcgttaactctcctgcaaaggcgcgttctccgccagatagttcgccatctggcaatattgcgcgacagagatattttccgctcgcatcgccgggtcgatccccattcccgttaacacctcgacgctaaacaggttgccgaggctgttacgaatggttttacgacgctggttaaaggcttcggtggtgatgcggctcaacacacgaacatctttaaccgggtgaggcatcgttgcatgaggaaccaggcgcacgacggcggaatccactttgggtggtggtgtaaaggcactcggcggtacttccagtaccgggatcacattgcaatagtattgcgccatgacgcttaatcgaccatacgctttgctgttcggtcctgcaaccagacgattcaccacctctttttgcaacataaagtgcatgtcggcaatggcatcagtatagctaaacagatggaacatcaacggcgtggagatgttataaggcaggttgccgaaaacacgcagcggctgacccattttctcggccagttcaccaaagttaaaggtcatcgcatcctgctgataaatcgtcagtttcgggcctaagaatggatgcgtttgcagacgtgccgccagatcgcggtcaagttcgatgaccgtcagctggtccagacgttcgccgaccggttcggtcaatgccgccagaccggggccgatttcgaccatcgcctggcccttttgcgggttaatggcagacacaatactgtcgatcacgaactgatcgttgagaaagttttgcccgaagcgtttacgggctaagtggccctggtggactcgattattcattgggtgttaacaatcattttgatggcgagattaagcgccgtaataaaactgccggcatcggctttgccacgtcccgccagttcaagcgcggtgccgtggtccacacttgtgcgaataaagggcaggcccagcgtaatgttcacaccgcgcccgaagccctggtattttagcacgggaagaccctgatcgtggtacatcgccagcacggcgtcggcgttatcaagatatttcggctgaaacagggtatcggcaggcagcggcccgttgagtttcatcccctgcgcccgcagctcattgagcaccggaataatggtgtctatctcttccgtacccatatgaccgccttcgcccgcgtgcggattcagcccgcagaccagaatgcgcggttcggcaataccaaatttggtccgcaaatcgtgatgcaaaatagcaatcacttcgtgcaaaagtgcaggggtgatagcgtctgcgatatcgcgcagcggtaaatgcgtcgttgccagcgccacgcgaagttcttcggtcgccagcatcatcaccacctttttcgcctggctacgctcttcgaaaaactcggtatgaccggtaaaaggaatgccagcgtcgttaataacgcctttatgcaccggacctgtgatcagcgcggcaaattcgccgttcagacaaccatcgcacgctcgcgccagcgtttccaccacataatgcccattttcaaccgctaactgccccgcagtgacaggtgcacgtagcgcgacaggaagtagcgttaatgtgcccgcagtttgcggttgtgcaggggagttgggggaataagggcggagggtgagcggcaaaccgagcatcgctgcccggttggtaaggagagtggcatcggcacaaacaaccagttcgaccggccactcacgctgtgcaagctggacaactaagtccgggccaatcccggcgggctcgccgggagtgatcacaacacgttgggttttaaccattagttgctcaggattttaacgtaggcgctggcacgttgttcctgcatccagcttgctgcttcttcgctgaacttacggttcatcagcatgcggtatgcacgatctttctgcgcagcgtcggttttatcgacattacgggtatccagcagttcgattaaatgccagccgaaactagagtgaaccggtgcactcatttgacctttgttcaggcgagtcagggcgtcacggaaggccggatcgaaaatatctggtgtagcccagccgagatcgccgccctggttagcagagcctggatcctgagagaactctttcgctgcggcagcaaaagtcgttttaccactcttgatatcagcagcaatctgttccagtttcacacgggcctgttcgtcagtcatgatcgggctcggtttcagcagaatatggcgagcatgaacttcggtcacgctgatatttttgctttcgccgcgcaggtcgttaactttcagaatatggaagccaacgccggaacgaatcgggccaacaatgtcgcctttcttcgcggtgcttaatgcctgggcgaagatcccgggcaactcctgaatacggccccagcccatctggccgccgttcagcgcctgctggtcggcagaatgagcaatcgccagcttaccgaaatcagcgccgttacgcgcctgatcgacaatggcgcgcgcctggctttccgcttcgttcacctgatcagaggtcgggttttccggcagcgggatcaggatgtggctcaggttcagctcagtgctggcgtcgttttggttacccacctgctgcgccagggattcgacttcctgcggcaggatggtgatgcgacgacgcacctcgttgttacgcacttcagagataatcatctctttgcggatctggttacgataggtgttgtagttcagtccatcgtaagccagacggctgcgcatctgatccagcgtcatgttgttctgtttcgcgatgttagcaatcgcctgatccagctgctcatcggagattttcactcccattttctgccccatctgcaggatgatttgatccatgatcaaacgttccatgatttggtggcgcagcgtcgcgtcatcaggaagttgctgccttgcctgagcagcgttcagttttacgctctgcattaatccatcaacgtcgctttccagcacgacgccgttattgacgacggctgcgactttatcgactacctggggggcagcgaaactggtattcgcgatcatggcgataccgagaagcagcgttttccagttcttcatactttttccatttcaattaaccgcactgcggattacgtggtaaatcaacaaatcacaaagtgttttgatacggcagaatgttgctacgcagcatctcttgcgtacccagaccgtagttggagctcaggccgcgaagttcgatgttaaagccgattgcgttgtcatataccgcatgttgtttatcgttatcccaaccgttcagcttccgctcgtaaccgacgcgaattgcatagcagcaggagctgtattgcacacctaacatagagtcggcttgcttgttagcattggtgtcgtagtagtaggccccaacaatggaccaacgatcggcaattggccagctggcgacagcacctacctggctaataccattcttatattgctcagcagtggaatagtacttaggcagcgtagcctgaatatattccgggctggcgtaacggtaattcagctgtaccagacggtcttcatcccgacggtattcaatgctggagttactggtcgctacgttatccagacgtgtatcgtactgaatcccgccacgcaatccccaacgctcggagatacgccagtaagtatcgcctgcccacaccagactacccgttttgtcgtcattctcccatgttatgttgtcatcgccagtgcgagactccgtgaaatagtagatttgaccaacggaaatattaaaacgttcaacggcagcatcatcatatatgcgagatgtgacaccggtcgtcacctggttagcggaggcaatacggtcaagaccgccgtaagtccggtcccggaacaggccagagtagtcagattgcagcagagagctgtcgtagttatagatgtcgctctgatcgcgatacggcacgtacaaatactgcgcgcgcggttccagcgtttgggtataacccggagccagcatttccatatcgcgttcaaagaccattttgccgtcaactttgaattgcggcattacgcggttaacggattcgtccagcttggtcgtgtttctggagttataccagtcaagattggtttgctgataatgggttgccagcaacttcgcttcggtattgatgctgccccagttattagagagcggcaaattgatggtcggttccaggtgaacacgggttgcttcaggcatgtcgtctctggtgttaacaaagtgcactgcctggccgtaaatacgcgtatcaaacggaccaacatcattctggtagtaattaacgtctaactgcggctctgcgctgtagctactggtgttctgttcgctgaaaacctggaactgcttggtactaacggtggcattgaagttttgcaccgcatagccaacgctgaatttttgcgttgcgtagccgtcagtactggaaccgtacttgttatcgaaatcattgaagtagctaggatcgctgaccttggtgtagtcgacgttgaaacgccacacctgatccatgaccccggagtggttccagtagaataaccaacgacgactactgtcatcgttcgggtgttcatcttcatagactttatcactaggcagatagtccagttccatcaagccagcgcccgcctgggagaggtagcggaattcgttctcccacatgatgttgccacgacgatgcatataatgcggcgtgatggtggcatccatatttggcgcgatgttccagtaatatggcaggtagaactcaaagtagttggtggtggtgtacttggcgttcgggatcaagaaaccagagcgacgtttgtcacccaccggcaactgcaaataggggctataaaagatcggtaccggacccaccttaaagcgggcgttccagatctccgcaacttgttcttcgcggtcatgaataatttcgctacctaccacgctccaggtgtcagaacccggcagacaggaggtaaagctaccgttatccagaatggtatagcggttttcgccacgttgtttcatcaggtccgctttaccgcgaccctggcgacccaccatctggtaatcaccttcccagacgttggtatctttggtgttcagattcgcccagcctttcggccctttgaggatcacctggttatcgtcgtaatggacattaccgagcgcatcaacggtacgtaccggctccggttgtcctggtgcctctttttgatggagctgcacttcgtcggcctgcagacggctgttaccctgcatgatatccacgctgccagtaaacacggcgtcatccgggtagtcccctttcgcgtggtcagcattgatagtcacgggtaagtcattggtatcgccctgtaccagaggacggtcatagcttggcacgcccaacatgcactgactggcgaggtcggctgccagtccctgttgactataaagggcggtggcaatcatggtggccaggagagtggggatacgttttttcatacgttgattttattgttccatcatcggtaacgttgcgcgtgacaaacggtcagagactaacgtactcgtcatctctacgctagtgttaatcctgtccgaatagcgtcagtggtgttaggcacggcattgaatgacaggtatgataatgcaaattataggcgatgtcccacaattgaccgcagccggaaaacggtaaaagcacctttatattgtgggagatagccctgatatccgtgtgtcgatttggggaatatatgcagtattggggaaaaatcattggcgtggccgtggccttactgatgggcggcggcttttggggcgtagtgttaggcctgttaattggccatatgtttgataaagcccgtagccgtaaaatggcgtggttcgccaaccagcgtgagcgtcaggcgctgttttttgccaccacttttgaagtgatggggcatttaaccaaatccaaaggtcgcgtcacggaggctgatattcatatcgccagccagttgatggaccgaatgaatcttcatggcgcttcccgtactgcggcgcaaaatgcgttccgggtgggaaaaagtgacaattacccgctgcgcgaaaagatgcgccagtttcgcagtgtctgctttggtcgttttgacttaattcgtatgtttctggagatccagattcaggcggcgtttgctgatggtagtctgcacccgaatgaacgggcggtgctgtatgtcattgcagaagaattagggatctcccgcgctcagtttgaccagtttttgcgcatgatgcagggcggtgcacagtttggcggcggttatcagcagcaaactggcggtggtaactggcagcaagcgcagcgtggcccaacgctggaagatgcctgtaatgtgctgggcgtgaagccgacggatgatgcgaccaccatcaaacgtgcctaccgtaagctgatgagtgaacaccatcccgataagctggtggcgaaaggtttgccgcctgagatgatggagatggcgaagcagaaagcgcaggaaattcagcaggcatatgagctgataaagcagcagaaagggtttaaatgaccctgtaaatgatgctgagtaactgcccacgattaaaggtggccgccctggcggtcacttctttgagaaaaggcgtttactcagaatggtggacaggctcaatgcacgatttacgggaggggttctgtaggttttatcgcgttgaccctgcttaaggttgagagctttacgacgagcggaattatatttttacgtcttaaaaataaaaaacacatacctgaatgagcgatttttgaaagtatatttattcagaacgcgcatcatgagtttttaactcaatgcgaggctattaccatgaaagtaagtgttccaggcatgccggttacacttttaaatatgagcaagaacgatatttataagatggtgagcggggacaagatggacgtgaagatgaatatctttcaacgcttgtgggagacgttacgccatctgttctggagtgataaacagactgaggcttataaacttctgttcaatttcgtgaataaccagactggcaacatcaacgccagtgaatactttactggggctatcaacgagaatgagagagaaaagtttatcaatagcctggaattattcaataaacttaaaacatgcgcaaaaaatccggatgagttggtcgcaaagggcaatatgcgctgggtcgcccagaccttcggggatatcgagttaagtgtcacttttttcattgaaaagaataagatatgtactcagacgttgcagctgcataagggccaaggtaacttgggcgttgatcttagaaaggcttaccttcccggcgttgacatgagggattgttaccttggtaaaaaaacaatgaaaggtagcaatgatatcctttatgagagacctgggtggaatgctaacctgggcgtgctaccccggacggtgctaccccggacggtgctaacccggacggtgctaacctggacggtgctaccgtgaacggtgctacctccttatatgatgaggtaattattattaataaaatcccccccaaaaaaattgatactaaaggagttgctactgaagaagttgctactaaaaaagtactgctgaacaaattactgacaacgcaattattgaatgagccagaataagctaaggttgaaggggctggaacgccccttcaaccttagcagtagcgtgggatgatttcacaattagaaagacctgcatgatgagctagagaagaggctagtgacgcaaggcgtcgtgcaggacacggatcaccgagatgggcatcgccaaccagactgctaattagcccatgaataacaatcagaaaggaccataacagacccgttaaaatgaaatataagagacggtcaacgggtgaagaaaaagttcaaaaattcgctgtggagcaggaagggaattaccgaatggaaagcgtagccacacgcaacaactgaaagcagtttggcagaaacaaaaaatccccggactcggggatttatgtacaagaggcagcccttaggatgagggtataaacgtacaggaaaggttaaaaatccgctggcgctttaaacgtcatactattgccatacgccggatgggtaatcgtcaacatctctgcatgtagcaacaaacgtggtgccatcgctctcgcttctggacttgcataaaaacgatcgccgagaatcggatgacccagcgccagcatatgcacacgcaattgatggctacgcccggtaatcggttttaacaccactcttgccgtgttatccgccgcatactccaccacttcatattccgtctgcgcaggtttacccgtttcgtaacagactttctgtttcgggcggtttggccagtcgcaaatcagcggcagatccaccagaccttctgcgggggatggatgcccccagacgcgggccacatactgctttttcggctcgcgctcgcggaactggcgttttaactcccgctccgcggctttggtcagcgccactacaatcacgccgctggtagccatatccagacgatgcacgctttctgcctgcggataatcacgctgaatgcgcgtcatcacgctgtctttgtgctcttccagacgacccggcacactcaacaaaccgctcggcttgttgaccaccataatatggtcatcctgatacaggataaccaaccagggttcctgcggtggattgtagttttccatccccattttcggctccgttactgatgcgttacaacgatcaaacgcagggcatccagacgccaacctgcctgatccaggctttccattacctgctgacggttgctctcaatggcggtcagttcgtcgtcacgaatgttcgggttcactgcacgcagagcttccagacgagacagctcggcagacagtttttcgtcggcttcgttacgcgctgcatcaatcaatgcacgggcagatttctcgatctgcgcttcacccagttgaaggatagcgtgaacatcctgctgcacggcgttaaccagtttgctgccggtgtgacggttaaccgcgttaagctggcggttaaaggtttcaaactctacctgcgccgccaggttgttgccgtttttatccagcagcatacgtaccggcgtcggtggcaggaagcggttgagctgcaactgcttcggagcctgggcttcaaccacataaatcagttccaccaacagcgtacctaccggcaacgctttgttttttaacagactaatcgtgctgctaccggtatcgccagaaaggatcagatccagaccgttgcggatcagcggatgctcccaggtaataaactgtgcatcttcacgcgccagcgccacttcacgatcaaaggtgatggtgatgccatcttcgctcaggccagggaagtccggcaccagcatatgatcggacggcgtcagcacgatcatgttgtcgccgcgatcgtcctgattgataccgataatatcgaacaggttcatggcgaaggcgatcaggttggtatcgtcatcctgctcttcaatgctttctgccagtgcctgggctttttcgccaccgttggagtggatttccagcaggcggtcacgaccctgttccagctgtgctttcagcgcttcatgttgctcgcggcagtttttgatcagatcgtcaaagccttcggtttgatccggactagccagatagttaatcagatcgttgtatacgctatcgtaaatagtgcgtccggtcgggcaggtgtgctcaaatgcatccagaccttcgtgataccagcgcaccagcacgctctgagcggttttctccagataaggcacatggatctgaatatcgtgcgcctggccgatacgatccagacgaccaatacgctgctccagtagatccgggttgaatggcaggtcaaacatcaccatgtggctggcgaactggaagttacgtccttcagaaccgatttcactgcacagcagtacctgtgcgccggtgtcttcttcggcaaaccaggcggcagcgcggtcacgttcgataatgctcataccttcgtggaacaccgcagcgcgaataccttcacgttcgcgcagtacctgctccagttgcagcgcagtggcagctttggcgcagatcaccagcactttctgagagcgatggctggtcaggtagcccatcagccactcaacgcgcggatcgaagttccaccaggtggcgttatcaccttcaaattcctgataaatacgctccgggtagagcatatcgcgagcacgatcttccgcacttttacgtgcgcccataatgccggagactttaatagccgtctgatactgcgtcggtagcggcagcttaatggtgtgcagctcgcgtttcgggaatcctttcacaccgttacgcgtgttacggaacagcacgcggctggtgccgtggcgatccatcagcatgctaaccagctcctgacgggcgctctgggcatcttcgctgtcgctgtttgctgcctgcaacagcggctcgatatcctgctcgccgatcatctcgccgagcatgttcagttcgtcattgctcagtttgttacctgccagcagcatggcaacggcgtccgcaaccggacgataatttttctgctcttcaacgaactgcgcaaaatcgtggaaacggttcgggtccagcagacgcagacgggcgaagtggctttccatccccagctgttccggggtcgcggtcagcagcagaacgcccggcacgtgctctgccagttgttcaatggcctgatattcacggcttggcgcatcttcgctccacaccaggtgatgcgcttcatcgaccaccagcaggtcccattcggcttcacagagatgttccaggcgctgtttgctacgacgggcaaaatccaggctgcaaatcaccagctgttcggtgtcaaacgggttgtaagcatcgtgctgagcttcggcataacgctcatcatcaaatagcgcaaagcgcaggttgaaacggcgcagcatttctaccagccactgatgctgtaaggtttccgggacgataattagcacacgttcagcagcgccagagagcagttgctgatgcaggatcatcccggcttcaatggttttccctaaacccacttcgtcagccagcaggacgcgcggcgcgtggcggcgaccaacatcatgagcgatgttgagctgatgcgggatcaggctggtacgctgaccgcgcaggccgctgtacggcatacggaactgttcgctggaatatttacgcgcgcgataacgcagcgcaaagcggtccatacggtcaatctgcccggcaaacagacggtcctgcggtttgctgaacaccagtttgctatcaaggaaaacttcacgcagggctacgccggactcttcagtatccaggcgagtaccgatataggtcagcaagccattttcttcttttacttcttcgacttgcatctgccagccgtcatggctggtaatggtatcaccagggttgaacatcacgcgggtcacgggggaatcactgcgtgcgtacagacggttttcaccagtagatgggaaaagtaaagtgacagttcgcgcatccaccgcgacaacggttccaagtcccaattcgctttctgtatcgctgatccagcgttgaccaagtgtaaaaggcatatgtgttcggctctatatctttaattgcaggcaataaccacccgctaccgtgcttatgaggtagtggtgttattcaggtccaggaatggaaagggcgctatggtactggatggcaaagcattcgtcacgcatcaaaatggtatctggcgaactcttttttttgctcaaaatagcccaagttgcccggtcataagtgtagcaaaattatcctcaataaaagggagtattccctccgccacgggttgtagctggcgggtcagatagtgttcgtaatccagtggactacgttggtagtccagcggctccgggccgttggtggtccatacgtacttaatggtgccgcgattctgatattgcaaggggcgaccacgcttttggttttcttcatcggcaaggcgagcggcgcgtacatgaggcggcacattacgctgatactcgctcagcggacggcgaaggcgtttacggtaaaccagtcgcgcatccagttcacccgccatcagtttgtcgatggtttcgcgtacatattcctgatatggctcgttgcggaagatgcgcaggtatagctcctgctgaaactgctgggccagcggcgtccagtcggtgcgcacggtttccagccctttaaacaccatccgctgcttgtcgccctcctgaatcagtccggcataacgctttttactgccggtatcggctccgcgaatggttggcatcagaaaacggcagaaatgggtttcatactccagttctaatgcgctggtcagccgttgtttttgcagcgtttccgcccaccaggcgttaacgtgctgcaccagtgcacgaccgattttcgccgcttcttcttcgctatgtgcgcctttcagccagacaaacgtactgtcggtatcgccgtagataacgtcgtagccctgtgcttcaatcaacgctttggtttgccgcatgatctgatgaccacgcatggtgatgctgcttgccagccgcggatcgaagaagcggcaggcggtggtgccgagcacgccataaaaggcattcatgatgattttcagcgcctggctcagcggtttgttaccctggcgtttggcttcatcgcgcccgtgccagatgttagtcacaatctccggcaggcaatgtttttctcggctgaaccaggcatcgagaaaaccttcggtactgtgctctggatcaggctgcgccatgccttccaccagcccgacgggatcaatcagaaaggtgcggatgatgctcgggtacaggcttttatagtccagcaccagcacactatcataaagccctggccgactatccatcacgtagccgccagggctggcgtgcggcggcacttcgccgagattaggcgcgacataaccagcgcgatgcattcgcggaaaatagagatgaccaaatgccgccacgctaccgccgtgtcggtccaccggcaggccgttcaccgttgcccgttcgagtaaaaatggcatgatttcagttttgtggaagatctgcgtcaccagctcgcaatctttcaggttataagttgccagcgcaggtttatcttcggcgaaacggcggtcaatttcgtccattcgatcccacgggttatcgatagattttccttcgcctaatagctcctgagcgacagtttccaggctgaaactagagaaattccagaacgcggatttcagcgcctcgataccgtcgataattagccgacctttagcctgggcaaaaaagacgccgtttttaaagccgtgctcgcgccactccagctcgctattatcgcgcccaagacgcagcggaagacggtaacgctcggcatgtttttgcagcattcgcagatcgaactgcaccacgttccaaccgatgatcacatcaggatcgtagttggcaaaccaggcgttgagtttttccagcaactgcgggcggctggcgacgtattccagttcgaaatcaaggctggaggcgtcgccattctccggccccagcatataaacgatgcgctgcccgcagccttccaggccgatgcagtacagctcaccgtggcgggtggtttcaatatctatagaaacccacttgagcggcggacgatagtcgggatgcggtttcagacgggcattaacgatagtgccattgtgcatatcaccctcgacccacaccggactggtgataaaccgctccatcagatagcgttctggcggacgcacatcggcctcgtagacggtaacgccaccttcacgcaggcgcttttcgtaattcatcaattggcgatgggcgcgacagtaaaggccatacaccggctggcggtgaaaatcctttaacgccagcggtgtcaggcgaaagccttgttcaccctgcaaaatatgctgagcgcggggaacctgatcggcgggaataaacgccacggactcttgcggtgcaagcgtaacctgcaacggcccgttgtccgtcgccagccagaaggagacttctgtcccttgcggggtgtcccgccagtgtcgggttaagataaaacctgcctgcgccacgctgaaaatccatcaaaaaaccaggcttgagtatagcctggtttcgtttgattggctgtggttttatacagtcattactgcccgtaatatgccttcgcgccatgcttacgcagatagtgtttatccagcagcgtttgctgcatatccggtaactgcggcgctaactgacggcagaatatccccatataagcgacctcttccagcacgatggcgttatgcaccgcatcttcggcatttttgccccatgcaaacgggccgtgggaatggaccagaacgccgggcatttgcgctgcatcgataccctgtttttcaaaggtttctacgatgacgttaccggtttcccactcatattcgccgttgatttctgcgtcggtcattttgcgggtgcagggaatggtgccgtagaaatagtcggcgtgggtggtgccggttgctggaatgctctgacccgcctgcgcccagatggtggcgtggcggctgtgcgtatgcacaatgccgccaatggaggggaatgcctgatagagcagccggtgagttggcgtgtcggaggagggctttttcgtaccttcaaccacttcaccggtttcgatgctaaccacgaccatatcgtcagcggtcatgacgctgtaatcgacgccggaaggtttgatcacaaagacgccgcgctcgcgatcaacggcgctgacgttgccccatgtgagcgtgaccaggttgtgttttggcagcgccaggttggcttctaatacctggcgtttgagatcttctaacatgttgactccttcgtgccggatgcgctttgcttatccggcctacaaaatcgcagcgtgtaggcctgataagacgcgccagcgtcgcatcaggcgttgaatgccggatgcgctttgcttatccggcctacaaaatcgcagcgcgtaggcctgataagacgcgccagcgtcgcatcaggcgttgaatgccggatgcgctttgcttatccggcctacaaaatcgcagcgtgtaggccagataagacgcgtcagcgtcgcatcaggcgttacataccggatgcggctacttagcgacgaaacccgtaatacacttcgttccagcgcagcgcgtctttaaacgctggcaggcgtgtgtcgttatcaatcaccgtgatttcaatgtcgtgcatctcggcgaattggcgcatatcgttgaggttcagtgcatggctgaagacggtatggtgcgcgccaccagcgaggatccacgcttcggaagcagttggcagatccggttgcgctttccacagcgcattcgccaccggcagtttcggcagggagtgcggtgttttcaccgtgtcgatgcagttaaccagtagacggtaacgatcgccgagatcaatcaagctggcgacaatcgctgggccggtttgggtattgaagatcaggcgggcaggatcgtccttaccaccaataccgagatgctgaacgtcgaggatcggtttctcttctgcggcgatgctcgggcagacttccagcatatgggagccgagcaccaggtcattacctttctcgaagtgataggtgtagtcctccataaaggaggtgccgccctgcagaccggtactcatcaccttcatgatgcgaagcagggcggcagttttccagtcgccttcgcccgcaaagccgtaaccctgctgcatcagacgctgtacggccagaccaggaagctgtttcagaccgtgcaaatcttcaaaggtggtggtgaacgcgtggaagccaccttgttccaggaaacgcttcatccccagctcaatacgcgccgcttccagcacgttctgtcgttttttgccgtggatttgtgtggcaggcgtcatggtgtagcagctttcgtactcatcgaccagcgcgttaacatcgccgtcgctgatggagttcaccacctgcaccagatcgccaaccgcccaggtattgacggagaaaccgaacttgatctgtgcggcaactttatcgccatcggtgaccgccacttcacgcatgttatcgccaaatcggcagactttcagatgacgggtatcctgtttagagaccgcctgacgcatccaggagccgatacgctcatgggcttgtttatcctgccagtgaccggtaaccacggcatgttgctgacgcatacgcgcgccaatgaagccgaactcgcgaccgccatgtgcagtctggttcaggttcataaagtccatatcgatactgtcccacggcagcgccgcgttgaactgggtgtggaattgcagcaacggtttgttgagcatggtcaggccgttgatccacattttggccggggagaaggtgtgcagccacaccaccagaccagcgcaacgatcgtcgtaattcgcgtcgcggcaaatagcggtgatttcatccggcgtggtgcccagcggtttcaacaccagtttgcagggcagtttcgcttccgtattcagcgcattaacgacgtgctcggcatgttgggtgacctgacgcagggtttccgggccatacagatgctggctgccaatgacaaaccacacttcataattatcaaaaatcgtcattatcgtgtccttatagagtcgcaacggcctgggcagcctgtgccggggcggaagttggaagatagtgttgttcggcgctcatcgcccattgctgatagcggcgataaagctgttcaaagcgttgtgcctgctcgctgcacggttgcagggttttctctaccgcactggccattttttgctgagcacttgggatgtctgcgtgcactttcgcggcgacggcagcaaaaatcgccgcaccgagcgcacagcactggtcagaggcaacaatttgcagcgggcgattcagcacgtcgcagcaggcctgcataatgacctggtttttccgcgcgatgccgcccagtgccatcacgttattaacggcgatcccctgatcggtaaagcactccatgattgcgcgtgcgccaaaggcggtggcagcaatcaaaccgccgaacagcagcggagcgtcggtagcgaggttaagatcggtaatcacccctttcaggcgttggttagcgttcggtgtgcggcggccgttaaaccagtcgagcaccaccggcaggtgatccagagacggatttttggcccatgcttcggtcagcgccggaagcagttgtttctggctggcgttgatttgcgttttcagttccggatgctgggcggcaagctgttccagcggccagccgagtacgcgaccaaaccaggcgtagatatcaccaaacgcgctttggcctgcttccagaccgataaatccaggcaccacgctgccatcaacctgaccgcaaatacctttaactgcccgctcgccaacgctctgtttgtcggcaatcagaatgtcgcaggtggaagtaccgataacttttaccagtgcgttaggctgtgcgcctgcgccaactgcgcccatatggcagtcaaacgcgccgccggaaatcaccacgctttcaggcaggccgagacgctgcgcccattccgggcataaggtgcccaccggaatatcggcagtccaagtgtcagtgaacagcggggaaggcaaatggcgattgaggatcgggtccagctcatcaaagaaactggctggcggcaggccgccccagctttcgtgccacagagatttatgcccggcgctgcaacgtccgcgacgaatatcctgcgggcgggtggtaccggaaagcagagctggcacccagtcgcacagctcaatccagcttgcggcagattgcgccacggcgctgtcctggcgagtcacatgcaggatttttgcccagaaccattcgctggaataaataccaccaatgtagcgggagtagtcaacgttgcccggcgcgtggcacaaacgggtaatctcttccgcttcttcaaccgcagtgtggtctttccacaatacgaacatcgcgttcgggttttcggcaaactccgggcgcagcgccagcacgtttccgtcggcatcaatcggtgcgggcgtgctgccggtactgtcaacgccaatcccgaccacagctgcgcgctgttcgacgctaagctctgcaagcacggttttcagtgccgcttccatactctcaatgtagtcacgcggatgatgacggaactggttattcggggcatcacaaaattgccctttctgccaacggggataccactctacgctggtggcgatctcttcaccggtagcgcagtccaccgccaaagctcgcacagaatcactgccaaaatcgaggccaattgcaatcgccatcgtttcactccatccaaaaaaacgggtatggagaaacagtagagagttgcgataaaaagcgtcaggtaggatccgctaatcttatggataaaaatgctatggcatagcaaagtgtgacgccgtgcaaataatcaatgtggacttttctgccgtgattatagacacttttgttacgcgtttttgtcatggctttggtcccgctttgttacagaatgcttttaataagcggggttaccggttgggttagcgagaagagccagtaaaagacgcagtgacggcaatgtctgatgcaatatggacaattggtttcttctctgaatggtgggagtatgaaaagtatggctgaagcgcaaaatgatcccctgctgccgggatacagctttaacgcccatctggtggcgggtttaacgccgattgaggccaacggttatctcgatttttttatcgaccgaccgctgggaatgaaaggttatattctcaatctcaccattcgcggtcagggggtggtgaaaaatcagggacgagaatttgtctgccgaccgggtgatattttgctgttcccgccaggagagattcatcactacggtcgtcatccggaggctcgcgaatggtatcaccagtgggtttactttcgtccgcgcgcctactggcatgaatggcttaactggccgagtatatttgccaatacgggtttctttcgcccggatgaagcgcaccagccgcatttcagcgacctgtttgggcaaatcattaacgccgggcaaggggaagggcgctatagcgagctgctggcgataaatctgcttgagcaattgttactgcggcgcatggaagcgattaacgagagcctccatccaccgatggataatcgggtacgcgaggcttgtcagtacatcagcgatcacctggcagacagcaattttgatatcgccagcgtcgcacagcatgtttgcttgagcccgagccgtctgagtcatcttttccgccagcagttagggattagcgtcttaagctggcgcgaggaccaacgcattagtcaggcgaagctgcttttgagcactacccggatgcctatcgccaccgtcggtcgcaatgttggttttgacgatcaactctatttcagccgagtatttaaaaaatgcaccggggccagcccgagcgagtttcgtgccggttgtgaagaaaaagtgaatgatgtagccgtcaagttgagttaattggtaacgaatcagacaattgacggcttgacggagtagcatagggtttgcagaatccctgcttcgtccatttgacaggcacattatgcaagcattgctggaacactttattacccaatccaccgtgtatagtttgatggcggtggtgttggtggcctttctggagagcctggcgctggtcggtttgattctacccggtacggtgctgatggcggggctgggagcgctgattggcagcggcgagttaagtttctggcacgcctggctggcagggattattggctgcttgatgggcgactggatttctttctggctgggttggcgttttaaaaagccgttgcatcgctggagttttctgaagaaaaacaaagcactacttgataaaactgaacatgcgttgcatcaacacagcatgttcaccattctggtcggtcgttttgttggcccgacgcgtccgctggtgccaatggtggcgggaatgctggatctgccggtggctaaatttattacgccgaatattatcggctgcctgctgtggccgccgttttacttcctgccagggattctggcgggcgcggcgatcgatattcctgccggaatgcagagcggtgagtttaaatggttgctgctggcaacagcggtgtttttgtgggttggtggctggctgtgctggcggttatggcgcagcggtaaagcgactgaccgtttgagtcattatttgtcccgcggtcgtttgttgtggctgacgccgttgatttctgccatcggcgtggtggcgctggtggtgttaattcgccacccgttgatgccggtgtatatcgatattttgcgtaaagtggttggggtttaagagatagtcttgtgcgggttgcctgatgcgacgcttgccgcgtcttatcaggcctacaaaacgcactacccgtaggtcggataaggcgttcacgccgcatccgacagtgcatattaacccgtaatccccaatagtgcgctagcactcgccttaccgctcaacaactcattggtcataccctgccaggcgatgcgcccgtcggcgactactacgctgcgcgtggcgatccgcgccgcatcttccacgctgtggctcaccatcaatagcgtcattttttgctgctggcagctcgtgctcaccagcgtcaacatctcctgacgtaacgccggatcgagcgcagagaacggttcatcgagcaataaaatcggctgttcgcgtaccagacaacgcgctaacgccactcgctgtcgctgaccgccggaaagctcgcccggtaaccgcgccattaaattatcaatccccatctggcgggcgatagcgtgcattttcccctgctgtaccgcgttcagtttcaatcccggatttagccccagcccgatgttctgtgcgaccgtcaggtggctgaacaggttgttctcctgaaacagcatgctcaccggacggcgactcggcggcatagttgtgtgatctacgccatcgatagtcaggctaccgctggctggcgtcagaaaaccggcgatcaaattcagcagggtacttttacccgcgccgcttggcccgaggatcgccacctgctcgccgcgttccaccgttaagctaaaacgcatcggcaaatggtggtaaagccaggtgatatcagtcagttttaacatttcgccccggtagtttttcaatcacggtaaacagcagaaaacagagcagcagcagaattaacgcggtgaccgcaccgtcctggctgcgataggagccaatttgctggtagagataaaacggcagggtgcggaaatcatcgttaccgaacaacgccaccacgccaaaatcaccaatgctcagcacgcatgcaaaggccagcgcctgcgccagtggacgtttcagggcgcgcagctccaccacttttaagcgactccagccttcaatccccaggctctgacataacatgctgtagcgggcggtgatatcgcgcatcgggttttccagcactttcagcgcataagggatcgccattaacgcattggtgaaaatcacaatgccgtcagcagattgtggcaggccgatagtgttgttgagcagtaaaaagaagccggtagccagcacaatccccggcatggcgaggatcaacatgccgctcatctccagcacctgacccgccagcattttctgccgcgcccgcagttcgcgactgctccatagcagcatcatggtcagcactacgcacaatacacctgccgccagcgcaatacgcaagctggtccacagcgcctgccacagcaccggttgtgccagcacttccggcaactggcgatttaccccatcgacgatcaccgccagtaacggtggcagcaacagcagcagcgccagcacaattaacaccgtgtcgcaaatgcggctatgcagacgatcgtccgggtcgcgccagccttgcagcagcgtggtgccgggcgcaatggccttactcaatcgctgactcaacagcaccagcccgaggcagcacaccatctggagcagcgccagcattgccgcgcgggcaggatcgtagtcgtaactcagcgcctgatagattgccagctcgatagtggtcgcctgcggaccgccccccaggcttagcacggtggcgaagctggcgaaacagagcataaagataagcgcagcaaccggcgggatttgtcgccgtaaccacggccattcgacgaagcggaaaaaatgccagctacgcatcccaagctgggcggcaagttgacgctgttcgccggggatgttttccagtgcctggagtaataagcggctcgccatcggcagattaaaaaacacatgggccagcaaaataccttgcaggccgtaggggctaaaggtccactccagaccgaggctttggcagagtgttgccagccagccctggcgaccatagacgctaagaatgccgaaaacagcgaccaacaccgggaggatcaaggtcattgcacacagacgcaacagcgccagccgacccggaaagcgcctgcgatagagcgcgcgggcgaggaatatcgcgggtatgacagagagcagtgcgctgagaaacgcctgccagaaggagaagcgcaccacatgccacagatagctgtcctgccagactgccacccagtcatcctgcggcgcgttccaccacagggcgagaaacgccgccagcgcaaccgctaccaccagcgtggtggcgcttacacctggaattaaccagccgggaattaacggctgacggcgcgttgccattcgctaatccatgcctgacgttgtgccgccacttcggctggcgtgaactccaacgtggttgcgggtttggtcaatttttcaaaaccggcaggcagcgtgacgtttgccaccggatacatccagttgccggttgggatcgcattctggaaagccggagaaaccataaactggaggaatttttgcgccagctccggctgcttgctggcagcggtgcgggcggcgacttccacttgcagatagtgaccttcgctgaagttcgcggcggcgtagttatctttcttctcttcgagaatgtgataagccggagaggtggtgtaactcagtaccagatcgctttcaccttttaaaaacaggccgtaggcttcgctccagcctttggtgaccgtgaccgttttcttcgccagtttctgccaggcttgtggggcgtcatcgccatagactttttgcatccatagcaacagacccagccccggtgtactggtgcgcggatcctgataaatcacccgccagttttgatcgctctcaaccagttctttcaggctttgtggcgggtttttcagtttgttcttgtcataaacgaaggcgaagtagccataatcaaacggtacgaaagtgtcattattccagccgccgggaacgttaacggcatccgctgccacaccgcttttggcaaacagtccggttttactggcggcgtctaacaggttgttatccagccccagcaccacatcggctttactgtttttgccttccatccgtagacggttgagaaggctaacgccatcttccagcgccaccagtttcagttcgcaattacagtcggcttcaaaggcttttttaaccaccggaccaggcccccagtcggcggcgaaggaatcgtaggtataaacagtcagaacgggtttagcgaaaacgggcgctgtgcacagcaacagcaggggcagacatttttttaacactttgcacctcaaaaaagagtggcaaaggacttgagaaggagcctcaaatcccttcgccggcgttatccggatcaggttcgacgggtattttctcagcgcacgcgtacgcgtggcaccccgttgagaacggcgttagtgtagtgattttgttatcaaccagcaatcatggatccggtggcgcaaaccacgcacttttaaaatcgaaccagccgagggtattcatgcgcaggccgcgcatactgcgttgcccctgaatgatcagccagtggtgcaataatggcaccatcgctttgctggcgaccagttgctggcaccagttcgccagattcatctcgccattgcgccagcgagcagcgtcggcttgccagtcaatgggaatgcaatgttgtagcagtggcacttcgcataaatgtgcgaaaacagagaagtccagcggcagggtaaagttggcgctgtttagccagatatcactttcgatctctcctgtatgccactgatcgtagtcgatctctttgattttcagcgtgacctggtgacttgccagaatctgctgcatgatcccggcaatcacccgatgctcactgtgatcctgataaaaggttagggtgaggctttccaggccagccggtttttcgctctttatggtgcgggcatggtgccaacgggggagcagtccataagccgggaaccacagttgctggtactgttcctcagcgaaatagaccagattagttggagaaagcacatagcttacccagtccctgacttgctgattcgccccgcgatgggtgcggctgtcgaacagtaaatagtagcaaccttcctccaggcggctttcaatctctttttcctcgccctgtggaccttttagcatcagccctccggctggctcgtcggcaatttccggcagaacccagacgttaacttcgtcgattaatgcccggtaaccgaagaagtcatcgaatgcctgaattttcagttgattggtgctgttgcgaatcaccgcatacggaccggtgccgatgggatggctggcaaagttactgagggtttcccattcgcgcggcaggatcatcgccggaacttgccccagcagtaacggtaaccagcggtccggttgcgtgagatggatatccagcgtccagggcgtcgggctcacaatgtcagcaatatggctatagagcggcagcgtattgattcgttttaaagaggcgatcacatcgtccatttccagttcacgaccatggtgaaaatggactcctggacgcaaaaagaaacgccagtgaagcggactaatttgctgccagtggtgggcgatgtctgcttccagttccccattttcctcatttatgcgcgttaggctactgaagatttgccgggcgatatgggtttcggaacggcgcaatgcgctgccaggtagcagattacgcaacggacgatagtagagcacgcgcaggatgtgccgcccctggcggaagctgcggcccagatgagaaaccagcatttgccgcacagtcgctttgtcgccaaccaactgcaccagttgatcgatacgatcctgctccagcaggtcttccgcccgctgttgctgaagcgccagcccggtatagaggaatgtcagacggctgcgtttaccgcgcccgacttccgcttcccacgtcagccagccgcgatcctgcatggtgttgagcagggtgcgcatatgacgacggctgcagctcaataacgctgccagttcgttgagcgttgtgtcctggcttttaccctcgcagcattgccacaggcggatgaactgttgttgcagacgagcagatggcataaaaggggaactcctgtgcaaaagacagcaattttattttccctatattaagtcaataattcctaacgatgaagcaagggggtgccccatgcgtcagttttatcagcactattttaccgcgacagcgaagttgtgctggttgcgttggttaagcgtcccacaacgattaaccatgcttgaaggactgatgcagtgggatgaccgcaattctgaaagttgacttgcctgcatcatgtgtgactgagtattggtgtaaaatcacccgccagcagattatacctgctggttttttttattctcgccgcgctaaaaagggaacgtatgatctggataatgacgatggctcgccgtatgaacggtgtttacgcggcatttatgctggtcgcttttatgatgggggtggccggggcgctacaggctcctacattgagcttatttctgagtcgtgaggttggcgcgcaacctttctggatcggcctcttttatacggtgaatgctattgctgggatcggcgtaagcctctggttggcaaaacgttctgacagtcagggcgatcggcgaaaactgattatattttgctgtttgatggctatcggcaatgcgctattgtttgcatttaatcgtcattatctgacgcttatcacctgtggtgtgcttctggcatctctggccaatacggcaatgccacagttatttgctctggcgcgggaatatgcggataacagcgcgcgagaagtggtgatgtttagcagcgtgatgcgtgcgcagctttctctggcatgggttatcggtccaccgttggcctttatgctggcgttgaattacggctttacggtgatgtttagcattgccgccgggatattcacactcagtctggtattgattgcatttatgcttccgtctgtggcgcgggtagaactgccgagcgaaaatgctttaagtatgcaaggtggctggcaggatagtaacgtacggatgttatttgtcgccagcacgttaatgtggacctgcaacaccatgtacattattgatatgccgttgtggatcagtagcgagttaggattgccagacaaactggcgggtttcctgatggggacggcagctggactggaaataccagcaatgattctggctggctactatgtcaaacgttatggtaagcggcgaatgatggtcatagcagtggcggcaggagtactgttttacaccggattgattttctttaatagccgtatggcgttgatgacgctgcaactttttaacgctgtatttatcggcattgttgcgggtattgggatgctatggtttcaggatttaatgcctggaagagcgggggcagctaccaccttatttactaacagtatttctaccggggtaattctggctggcgttattcagggagcaattgcacaaagttgggggcactttgctgtctactgggtaattgcggttatttctgttgtcgcattatttttaaccgcaaaggttaaagacgtttgatgacgtggacgatagcggaaagcccggtcatttgaccgggcaaggggattaattcataaacgcaggttgttttgcttcataagcggcaatggcgtcgtcgtgctgcaaggtaagcccaatactgtccagaccgttcatcatgcagtggcggcggaaggcatcgatggtaaagcgataggttttctctcccgctttcacctcttgcgcttccagatccacgtcgaaatggatccccggattagctttcaccagcgcaaacagttcgtccacttctgcatcgcttaatttcaccggcagcagctggttgttaaagctattgccgtagaagatgtcagcaaaactcggcgcaatcaccactttaaaaccgtagtcggtcaatgcccagggcgcgtgctcacggctagagccacagccgaagttttctcgtgccagcaaaatggaagcgccctgatactgcgggaagttcagcacgaagtccgggtttggctgttggcctttttcatccagaaaacgccagtcgttaaacagatgcgcgccaaaacccgtacgggtcactttctgcaaaaactgtttcgggatgattgcatcggtatcgacattggcggcatccagcggaaccaccaggcctgtgtgtttgataaatttctctgccatggtgtgctccttatttaatgttgcgaatgtcggcgaaatgtccggtcacagcagcagcggcagccattgccgggctgaccagatgcgtgcgcccgccgcgcccctggcggccttcaaagttacggttgctggtggaggcacaacgttcgcccggattcagacggtcgttgttcatcgccagacacatactgcagccaggcaagcgccattcaaaaccggcttcaataaagattttatccagaccttccgcttccgcctgggcttttaccgggccagagccgggaaccaccagtgcctgcacgcctggcgcgacttttcgccctttggcgatctccgctgccgcgcgtaaatcttcaatgcggctgttggtacaggaaccgataaacactttgtcgatagccacttcggtcagcggaatacccggtttcagccccatataggccagcgctttttctgcgctcgcgcgttcaaccggatcggcaaagctagccggatcgggaatattgtcgttcacggaaatcacctggccgggattggtgccccaggtgacctgcggactaatttcttctgcttgcagagtgacaacggtatcgaaagttgcgccttcgtcggtttgcagggttttccagtaggcaacggcgtcgtcgaaatctttgcctttcggcgcatgcagacggcctttgacatagttaaaggtggtttcgtccggtgcaaccagaccggcttttgcgcccatttcgattgccatattgcacagggtcatacgaccttccatgcttaaatcacggattgcttcgccgcaaaactccaccacatgcccggtgccgcctgcgctaccggttttaccgataattgccagcacgatatcttttgcggtaatgcccggcgcggctttgccctggacttcaattttcatggtttttgcgcggccctgtttcagggtttgcgttgccagtacgtgttcaacttcggaagtgccgataccaaaggccagtgcgccaaacgcgccgtgggtggcggtatggctgtcgccgcagacaatggtcatccccggcaaggtgacgccctgttccggccccattacgtggacgatcccctgatacgggtgattcaggtcatacagttcgacgccaaattctttgcagtttttgatcagttcctgcatctggatacgcgccatttcaccgcaggcattaatgtctttggtctgggtagagacgttgtgatccatggtagcgaaggttttgcccggctgacgtaccgggcgaccgtgggcgcgcagaccatcgaacgcctgcggactggtcacttcatgcaccaggtggcggtcgatatataacagtggggtttcgttttcggcttcgtacacaacgtgagcgtcgaacaatttttcgtataacgtcttagccatgattacaccccttctgctacatagcgggcaatgatatcgcccatttcatcggtactaacggcggcagcgccacgggctaaatccccggtgcgaatgccttcttctaatgcgcggttaatggcgcgttcaatggcgcaagccgcatcatcggcatccaggctgtaacgcagcagcagtgccaggctaaggatttgtgcaatcgggttggcgatgtttttgcctgcgatatctggtgcgctgccgcccgccggttcatacagtccaaaaccttgctcgttcaggctggcggaaggcaacatccccatgctgccagtgatcattgcgcactcgtcagacagaatgtcgccaaacaggttggagcacagcagaacgtcaaactgacttggatctttaatcagctgcatggtggcgttgtcgatgtacatatgcgccagttcgacatccgggtattccgtggcgatctcgttaacgatctcccgccataaaatagaggattgcagcacgttggctttatcgatgctcgtcactttgtggcgacgcttgcgagcagattcaaacgcgatgcgggcgatacgttcgatctcaaaacggtgatacacctcggtatcaaaggctttttcatattgtccgctaccttcgcggccttttggctgaccgaaatagatgccgccggtcagttcgcgcacacacaggatgtcgaagccgtttgcggcaatgtctgcacgcagcggacagaatgcttccagcccctgatacagttttgccgggcgcaggttgctgaataatttgaagtgcttacgcagaggcagcagcgcgccgcgttctggttgctggtctggtggtaaatgttcccacttcgggccgcctacgctgccaaacagcacggcatcggcttgctcacaaccttcaaccgtcgcaggcggcagtggttgcccgtggttatcaatggctgcgccgcctacatcgtaatggctggtggtgatgcgcatcgcaaagcggttgcgcacggcatccagcactttcagcgcctgggtcatcacttccggaccaataccgtcccccggcaatacggcaatatggtaattcttgctcatcacacggtttccttgttgttttcgttgtgttgagctttgcgttgcaactctttttcgacttctgcggcacgccagatattgttcagaacgtgcaccatggctttggcagaactctcgacaatatcggtagccaggccgacgccgtggaagcggcgaccgttgtagttagcgacgatatccacctgacccagcgcatctttaccgtggcctttggcggtcaggctgtatttcaccagttcgacgttatattcagtgatgcggttaattgcctgatagacggcatcgaccggaccgttaccgttggcggcttctgctttgacttcttcgccacaggccagtttgacggcggcggtggcgatatcgttagagccagactgcacgctgaagtaatccagacggaaatgctccggctcttcttgctgcttaccgatgaaggccagcgcctccagatcgtaatcaaacacctgaccttttttgtccgccagcttcaggaaagcatcgtacaaattgtctaaattatattcactttctttataccccatctcatccatgcgatgtttcaccgccgcacgcccgctacgagaggtcagattcagctggatttggttcagaccaatagattctggtgtcatgatttcgtagttttcgcggtttttcagcacgccatcctggtgtataccggaggagtgtgcgaatgcgccgctgccaacaatggctttgtttgccgggatcggcatattacaaatctggctaactaactggctggtgcgccatatctcctggtgattaatggcggtgtggacgttgagaatatccttacgaactttgatcgccatgatgacttcttccagggaacagtttccggcacgctcgccgatcccgttcattgcgccttccacctggcgtgcaccggcatgtaccgccgccagactgtttccgaccgccaggcccaaatcgtcgtgggtatgtacggagataatggctttgtcgatgttaggcacgcgttcatacaggccgctgatgattccggcgaactcaaacggcatggtgtagcccacggtgtccggaatgttgatggtggtggcaccggcattaatcgccgcttcgaccactcgcgccagatcggcaatgggtgtacgcccggcatcttcgcaagaaaattcaacatcatcggtgtaattacgggcgcgtttcaccatatagatagcgcgttcgatcacctcgtccagcgtgctgcgcagcttggtggcgatgtgcattgggctagtggcaataaaggtatgaatacggaaggcttcggcgactttcagggattcggccgccacgtcgatatctttttccacgcagcgagctaacgcacatacgcggctgtttttaacctggcgggcgatggtttgcacgctttcaaaatcgcccgggctagagacggggaaaccgacttccatcacgtcaacacccatacgctcaagggccagcgcaatttgcagtttttctttcacactcaagcttgcctgtaacgcctgttcaccgtcgcgcaatgtggtatcgaaaataatgacttgctggctcatggtttgggtccttgtctcttttagagcgcctcgcttcgggcataaaaaaacccgcgcaatggcgcgggttttttgtttgactgcgtgctggcttaatgctggatgccgctcactcgtctaccgcgcaaagaagatgcgtttagtagtagtagaccgataaagcgaacgatgtgagtcattaaatcagctccagatgaatgcgatatgcttttagagttactggatacaaaaacggatgtcaaccctgacgcaataaaaacgtcccgccagcgtgagttctgcatccgtaaaattagctaattgtgctgcggtggttaaagtaagcgatattaatttctgcttaactaccgacgcttttcatcggttgacatatttcagcataaatttttgcatctaatcaacgaggaaaaaggggacaaaatgcacgcgttgcaaaacctatcctgatgatttgtattgaattatatgttttgcgattttttttgatattgatttggtgaatattattgatcaattaatgttaagaattaatgcattaaatatataaattaattattaaataagcacatttaatccattttgtagatgattgagtattcgcggtagttatgattagattgttttcgcaacaaaaacattatggattattatgctgtggtaaatgactcattccacggcaatggattctgtttttatcagaacccgtatctttatgttttccgaattttactcattttgctttttcttattttatatgcatgataaatcatattcttcaggattatttctctgcattccaataagggaaagggagttaagtgtgacagtggagttaagtatgccagaggtacaaacagatcatccagagacggcggagttaagcaaaccacagctacgcatggtcgatctcaacttattaaccgttttcgatgccgtgatgcaggagcaaaacattactcgtgccgctcatgttctgggaatgagccaacctgcggtcagtaacgctgttgcacgcctgaaggtgatgtttaatgacgagctttttgttcgttatggccgtggtattcaaccgactgctcgcgcatttcaactttttggtagtgttcgtcaggcattgcaactagtacaaaatgaattgcctggtagtggttttgaacccgcgagcagtgaacgtgtatttcatctttgtgtttgcagcccgttagacagcattctgaccagccagatttataatcacattgagcagattgcgccaaatatacatgttatgttcaagtctagtttaaatcagaacactgaacatcagctgcgttatcaggaaacggagtttgtgattagttatgaagacttccatcgtcctgaatttaccagcgtaccattatttaaagatgaaatggtgctggtagccagcaaaaatcatccaacaattaagggcccgttactgaaacatgatgtttataacgaacaacatgcggcggttagcctcgatcgtttcgcgagttttagtcaaccttggtatgacacggtagataagcaagccagtatcgcgtatcagggcatggcaatgatgagcgtacttagcgtggtgagccaaacgcatttggtcgctattgcgccgcgttggctggctgaagagttcgctgaatccttagaattacaggtattaccgctgccgttaaaacaaaacagcagaacctgttatctctcctggcatgaagctgccgggcgcgataaaggccatcagtggatggaagagcaattagtcagtatttgcaaacgctaactgattgcagaataggtcagacatgaatgtctggtttattctgcattttttattgaatgtagaattttattctgaatgtgtgggctctctattttaggattaattaaaaaaatagagaaattgctgtaagttgtgggattcagccgatttattatcaatttaatcctctgtaatggaggattttatcgtttcttttcacctttcctcctgtttattcttattaccccgtgtttatgtctctggctgccaattgcttaagcaagatcggacggttaatgtgttttacacattttttccgtcaaacagtgaggcaggccatggagatgttgtctggagccgagatggtcgtccgaagccttatcgatcagggcgttaaacaagtattcggttatcccggaggcgcagtccttgatatttatgatgcattgcataccgtgggtggtattgatcatgtattagttcgtcatgagcaggcggcggtgcatatggccgatggcctggcgcgcgcgaccggggaagtcggcgtcgtgctggtaacgagcggtccaggggcgaccaatgcgattactggcatcgccaccgcttatatggattccattccattagttgtcctttccgggcaggtagcgaccagcttgataggttacgatgcctttcaggagtgcgacatggtggggattagccgaccggtggttaaacacagttttctggttaagcaaacggaagacattccgcaggtgctgaaaaaggctttctggctggcggcaagtggtcgcccaggaccagtagtcgttgatttaccgaaagatattcttaatccggcgaacaaattaccctatgtctggccggagagcgtcagtatgcgttcttacaatcccactactaccggacataaagggcaaattaagcgtgctctgcaaacgctggtagcggcaaaaaaaccggttgtctacgtaggcggtggggcaatcacggcgggctgccatcagcagttgaaagaaacggtggaggcgttgaatctgcccgttgtttgcagtttgatggggctgggggcgtttccggcaacgcatcgtcaggcactgggcatgctgggaatgcacggtacctacgaagccaatatgacgatgcataacgcggatgtgattttcgccgtcggggtacgatttgatgaccgaacgacgaacaatctggcaaagtactgcccaaatgccactgttctgcatatcgatattgatcctacttccatttctaaaaccgtgactgcggatatcccgattgtgggggatgctcgccaggtcctcgaacaaatgcttgaactcttgagccaagaatccgcccatcaaccactggatgagatccgcgactggtggcagcaaattgaacagtggcgcgctcgtcagtgcctgaaatatgacactcacagtgaaaagattaaaccgcaggcggtgatcgagactctttggcggttgacgaagggagacgcttacgtgacgtccgatgtcgggcagcaccagatgtttgctgcactttattatccattcgacaaaccgcgtcgctggatcaattccggtggcctcggcacgatgggttttggtttacctgcggcactgggcgtcaaaatggcgttgccagaagaaaccgtggtttgcgtcactggcgacggcagtattcagatgaacatccaggaactgtctaccgcgttgcaatacgagttgcccgtactggtggtgaatctcaataaccgctatctggggatggtgaagcagtggcaggacatgatctattccggccgtcatagtcaatcttatatgcaaagcctacccgatttcgtccgtctggcggaagcctatgggcatgtcgggatccagatttctcatccgcatgagctggaaagcaaacttagcgaggcgctggaacaggtgcgcaataatcgcctggtgtttgttgatgttaccgtcgatggcagcgagcacgtctacccgatgcagattcgcgggggcggaatggatgaaatgtggttaagcaaaacggagagaacctgattatgcgccggatattaagtgtcttactcgaaaatgaaagtggcgcgttatcccgcgtgattggccttttttcccagcgtggctacaacattgaaagcctgaccgttgcgccaaccgacgatccgacattaagccgtatgaccatccagaccgtgggcgatgaaaaagtacttgagcagatcgaaaagcaattacacaaactggtcgatgtcttgcgcgtgagtgagttggggcagggcgcgcatgttgagcgggaaatcatgctggtgaaaattcaggccagcggttacgggcgtgacgaagtgaaacgtaatacggaaatattccgtgggcaaattatcgatgtcacacccagcctttataccgttcaattagcaggcaccagcggtaagcttgatgcatttttagcaagcattcgcgatgtggcgaaaattgtggaggttgctcgctctggtgtggtcggacttagccgcggcgataaaataatgcgttgagaatgatctcaatgcgcaatttacagcccaacatgtcacgttgggctttttttgcgaaatcagtgggaacctggaataaaagcagttgccgcagttaattttctgcgcttagatgttaatgaatttaacccataccagtacaatggctatggtttttacattttacgcaaggggcaattgtgaaactggatgaaatcgctcggctggcgggagtgagccggaccactgcaagctatgttattaacggcaaagcgaagcaataccgtgtgagcgacaaaaccgttgaaaaagtcatggctgtggtgcgtgagcacaattaccacccgaacgccgtggcagctgggcttcgtgctggacgcacacgttctattggtcttgtgatccccgatctggagaacaccagctatacccgcatcgctaactatcttgaacgccaggcgcggcaacggggttatcaactgctgattgcctgcagtgaagatcagccagacaacgaaatgcggtgcattgagcaccttttacagcgtcaggttgatgccattattgttagcacgagcttgcctcctgagcatcctttttatcaacgctgggctaacgacccgttcccgattgtcgcgctggaccgcgccctcgatcgtgaacacttcaccagcgtggttggtgccgatcaggatgatgccgaaatgctggcggaagagttacgtaagtttcccgccgagacggtgctttatcttggtgcgctaccggagctttctgtcagcttcctgcgtgaacaaggtttccgtactgcctggaaagatgatccgcgcgaagtgcatttcctgtatgccaacagctatgagcgggaggcggctgcccagttattcgaaaaatggctggaaacgcatccgatgccgcaggcgctgttcacaacgagctttgcgttgttgcaaggagtgatggatgtcacgctgcgtcgcgacggcaaactgccttctgacctggcaattgccacctttggcgataacgaactgctcgacttcttacagtgtccggtgctggcagtggctcaacgtcaccgcgatgtcgcagagcgtgtgctggagattgtcctggcaagcctggacgaaccgcgtaagccaaaacctggtttaacgcgcattaaacgtaatctctatcgccgcggcgtgctcagccgtagctaagccgcgaacaaaaatacgcgccaggtgaatttccctctggcgcgtagagtacgggactggacatcaatatgcttaaagtaaataagactattcctgactattattgataaatgcttttaaacccgcccgttaattaactcaccagctgaaattcacaataattaagtgatatcgacagcgcgtttttgcattattttgttacatgcggcgatgaattgccgatttaacaaacacttttctttgcttttgcgcaaacccgctggcatcaagcgccacacagacgtaacaaggactgttaaccggggaagatatgtcctaaaatgccgctcgcgtcgcaaactgacactttatatttgctgtggaaaatagtgagtcattttaaaacggtgatgacgatgagggattttttcttacagctattcataacgttaatttgcttcgcacgttggacgtaaaataaacaacgctgatattagccgtaaacatcgggttttttacctcggtatgccttgtgactggcttgacaagcttttcctcagctccgtaaactcctttcagtgggaaattgtggggcaaagtgggaataaggggtgaggctggcatgttccggggagcaacgttagtcaatctcgacagcaaagggcgcttaagtgtgcctacccgttatcgggaacagctgcttgagaacgctgccggtcaaatggtttgcaccattgacatttatcacccgtgcctgctgctttaccccctgcctgaatgggaaattatcgagcaaaaattaagccgtctgagcagcatgaacccggttgagcgccgtgtgcagcgcctactgttaggtcatgccagcgaatgtcagatggatggcgcaggtcgattgttaatcgcgccagtactgcggcaacatgccgggctgacaaaagaagtgatgctggttggacagttcaacaagtttgagctgtgggatgaaacaacctggcatcaacaggtcaaggaagatatcgacgcagagcagttggctaccggagacttaagcgagcgactgcaggacttgtctctataaaatgatggaaaactataaacatactacggtgctgctggatgaagccgttaatggcctcaatatccgtcctgatggcatctacattgatgggacttttggtcgcggtggtcacagtcgtctgatcctcagccagcttggcgaagaggggcgtttgctggcgatcgatcgcgacccgcaggctatcgccgttgcgaagactattgatgatccgcgcttctccatcatccacggacctttctccgcgctgggcgaatacgttgccgagcgcgatcttatcggcaagatcgacggcattctcctcgatcttggcgtctctagtccgcaacttgatgatgctgaacgtggcttttcctttatgcgcgatggtccgctggacatgcgtatggacccaacccgtgggcagagtgccgctgaatggctacaaaccgcagaagaagccgatatcgcctgggtattgaaaacctatggtgaagagcgttttgccaaacgcattgcccgcgccattgtcgagcgtaaccgcgaacagccgatgacccgcaccaaagaactggcggaagtcgtggctgctgcaacgccggtgaaagataagtttaaacatcccgcgacccgtaccttccaggcggtgcgcatttgggtaaacagtgaactggaggagatagagcaggcgctaaaaagcagcctcaacgtgctggccccgggtgggcggcttagcatcatcagcttccacagcctggaagaccgtattgtgaaacgttttatgcgtgaaaacagccgcggtccgcaagttccggcagggttaccgatgactgaagagcagctcaaaaaactgggtggccgtcagctgcgagcactaggcaagttaatgccgggcgaagaagaggtggctgagaaccctcgtgcccgtagtagtgttctgcgtattgcagagaggacgaatgcatgatcagcagagtgacagaagctctaagcaaagttaaaggaagcatgggaagccacgagcgccatgcattgcctggtgttatcggtgacgatcttttgcgatttgggaagctgccactctgcctgttcatttgcattattttgacggcggtgactgtggtaaccacggcgcaccatacccgtttactgaccgctcagcgcgaacaactggtgctggagcgagatgctttagacattgaatggcgcaacctgatccttgaagagaatgcgctcggcgaccatagccgggtggaaaggatcgccacggaaaagctgcaaatgcagcatgttgatccgagtcaagaaaatatcgtagtgcaaaaataaggataaacgcgacgcatgaaagcagcggcgaaaacgcagaaaccaaaacgtcaggaagaacatgccaactttatcagttggcgttttgcgttgttatgcggctgtattctcctggcgctggcttttctgctcggacgcgtagcgtggttacaagttatctccccggatatgctggtgaaagagggcgacatgcgttctcttcgcgttcagcaagtttccacctcccgcggcatgattactgaccgttctggtcgcccgttagcggtgagcgtgccggtaaaagcgatttgggctgacccgaaagaagtgcatgacgctggcggtatcagcgtcggtgaccgctggaaggcgctggctaacgcgctcaatattccgctggatcagcttagtgcccgcattaacgccaacccgaaagggcgctttatttatctggcgcgtcaggtgaaccctgacatggcggactacatcaaaaaactgaaactgccggggattcatctgcgtgaagagtctcgccgttactatccgtccggcgaagtgactgctcacctcatcggctttactaacgtcgatagtcaagggattgagggcgttgagaagagtttcgataaatggcttaccgggcagccgggtgagcgcattgtgcgtaaagaccgctatggtcgcgtaattgaagatatttcttctactgacagccaggcagcgcacaacctggcgctgagtattgatgaacgcctgcaggcgctggtttatcgcgaactgaacaacgcggtggcctttaacaaggctgaatctggtagcgccgtgctggtggatgtcaacaccggtgaagtgctggcgatggctaacagcccgagttacaaccctaacaatctgagcggcacgccgaaagaggcgatgcgtaaccgtaccatcaccgacgtgtttgaaccgggcagtacggttaaaccgatggtggtaatgaccgcgttgcaacgtggcgtggtgcgggaaaacagcgtactcaataccattccttatcgaattaacggccacgaaatcaaagacgtggcacgctacagcgaattaaccctgaccggggtattacagaagagcagtaacgtcggtgtttccaagctggcgttagcgatgccgtccagtgcgttagtagatacttacagtcgttttggactgggaaaagcgaccaatttggggttggtcggagaacgcagtggcttatatcctcaaaaacaacggtggtctgacatagagagggccaccttctctttcggctacgggctaatggtaacaccattacagttagcgcgagtctacgcaactatcggcagctacggcatttatcgcccactgagcattaccaaagttgaccccccggttcccggtgaacgtgtcttcccggaatccattgtccgcactgtggtgcatatgatggaaagcgtggcgctaccaggcggcggcggcgtgaaggcggcgattaaaggctatcgtatcgccattaaaaccggtaccgcgaaaaaggtcgggccggacggtcgctacatcaataaatatattgcttataccgcaggcgttgcgcctgcgagtcagccgcgcttcgcgctggttgttgttatcaacgatccgcaggcgggtaaatactacggcggcgccgtttccgcgccggtctttggtgccatcatgggcggcgtattgcgtaccatgaacatcgagccggatgcgctgacaacgggcgataaaaatgaatttgtgattaatcaaggcgaggggacaggtggcagaagctaaagcctgagcgcttcgcgctggttgttgttatcaacgatccgcaggcgggtaaatactacggcggcgccgtttccgcgccggtctttggtgccatcatgggcggcgtattgcgtaccatgaacatcgagccggatgcgctgacaacgggcgataaaaatgaatttgtgattaatcaaggcgaggggacaggtggcagatcgtaatttgcgcgaccttcttgctccgtgggtgccagacgcacctagccgagcactgcgagagatgacactcgacagccgtgtggctgcggcgggcgatctctttgtagctgtagtaggtcatcaggcggacgggcgtcgatatatcccgcaggcgatagcgcaaggtgtggctgccattattgcagaggcgaaagatgaggcgaccgatggtgaaatccgtgaaatgcacggcgtaccggtcatctatctcagccagctcaacgagcgtttatctgcactggcgggccgcttttaccatgaaccctctgacaatttacgtctcgtgggcgtaacgggcaccaacggcaaaaccacgactacccagctgttggcgcagtggagccaactgcttggcgaaatcagcgcggtaatgggcaccgttggtaacggcctgctggggaaagtgatcccgacagaaaatacaaccggtagcgcagtcgatgttcagcatgagctggcggggctggtggatcagggcgcgacgttttgcgcaatggaagtttcctcccacgggctggtacagcaccgtgtggcggcattgaaatttgcggcgagcgtctttaccaacttaagccgcgatcaccttgattatcatggtgatatggaacactacgaagccgcgaaatggctgctttattctgagcatcattgcggtcaggcgattattaacgccgacgatgaagtgggccgccgctggctggcaaaactgccggacgcggttgcggtaagtatggaagatcatattaatccgaactgtcacggacgctggttgaaagcgaccgaagtgaactatcacgacagcggtgcgacgattcgctttagcagtagttggggcgatggcgaaattgaaagccatctgatgggcgcttttaacgtcagcaacctgctgctcgcgctggcgacactgttggcactcggctatccactggctgatctgctgaaaaccgccgcgcgtctgcaaccggtttgcggacgtatggaagtgttcactgcgccaggcaaaccgacggtggtggtggattacgcgcatacgccggatgcactggaaaaagccttacaggcggcgcgtctgcactgtgcgggcaagctgtggtgtgtctttggctgtggtggcgatcgcgataaaggtaagcgtccactgatgggcgcaattgccgaagagtttgctgacgtggcggtggtgacggacgataacccgcgtaccgaagaaccgcgtgccatcatcaacgatattctggcgggaatgttagatgccggacatgccaaagtgatggaaggccgtgctgaagcggtgacttgcgccgttatgcaggctaaagagaatgatgtggtactggtcgcgggcaaaggccatgaagattaccagattgttggcaatcagcgtctggactactccgatcgcgtcacggtggcgcgtctgctgggggtgattgcatgattagcgtaacccttagccaacttaccgacattctcaacggtgaactgcaaggtgcagatatcacccttgatgctgtaaccactgatacccgaaaactgacgccgggctgcctgtttgttgccctgaaaggcgaacgttttgatgcccacgattttgccgaccaggcgaaagctggcggcgcaggcgcactactggttagccgtccgctggacatcgacctgccgcagttaatcgtcaaggatacgcgtctggcgtttggtgaactggctgcatgggttcgccagcaagttccggcgcgcgtggttgctctgacggggtcctccggcaaaacctccgttaaagagatgacggcggcgattttaagccagtgcggcaacacgctttatacggcaggcaatctcaacaacgacatcggtgtaccgatgacgctgttgcgcttaacgccggaatacgattacgcagttattgaacttggcgcgaaccatcagggcgaaatagcctggactgtgagtctgactcgcccggaagctgcgctggtcaacaacctggcagcggcgcatctggaaggttttggcagccttgcgggtgtcgcgaaagcgaaaggtgaaatctttagcggcctgccggaaaacggtatcgccattatgaacgccgacaacaacgactggctgaactggcagagcgtaattggcagtcgcaaagtgtggcgtttcagtcccaatgccgccaacagcgatttcaccgccaccaatatccatgtgaccagccacggtacggaatttaccctacaaaccccaaccggtagcgtcgatgttctgctgccgttgccggggcgtcacaatattgcgaatgcgctggcagccgctgcgctctccatgtccgtgggcgcaacgcttgatgctatcaaagcggggctggcaaatctgaaagctgttccaggccgtctgttccccatccaactggcagaaaaccagttgctgctcgacgactcctacaacgccaatgtcggtagtatgactgcagcagtccaggtactggctgaaatgccgggctaccgcgtgctggtggtgggcgatatggcggaactgggcgctgaaagcgaagcctgccatgtacaggtgggcgaggcggcaaaagctgctggtattgaccgcgtgttaagcgtgggtaaacaaagccatgctatcagcaccgccagcggcgttggcgaacattttgctgataaaactgcgttaattacgcgtcttaaattactgattgctgagcaacaggtaattacgattttagttaagggtagtcgtagtgccgccatggaagaggtagtacgcgctttacaggagaatgggacatgttaatataagctttacaggagaatgggacatgttagtttggctggccgaacatttggtcaaatattattccggctttaacgtcttttcctatctgacgtttcgcgccatcgtcagcctgctgaccgcgctgttcatcagtttgtggatgggcccgcgtatgattgctcatttgcaaaaactttcctttggtcaggtggtgcgtaacgacggtcctgaaagtcacttcagcaagcgcggtacgccgaccatgggcgggattatgatcctgacggcgattgtgatctccgtactgctgtgggcttacccgtccaatccgtacgtctggtgcgtgttggtggtgctggtaggttacggtgttattggctttgttgatgattatcgcaaagtggtgcgtaaagacaccaaagggttgatcgctcgttggaagtatttctggatgagcgtcattgcgctgggtgtcgccttcgccctgtaccttgccggcaaagacacgcccgcaacgcagctggtggtcccattctttaaagatgtgatgccgcagctggggctgttctacattctgctggcttacttcgtcattgtgggtactggcaacgcggtaaacctgaccgatggtctcgacggcctggcaattatgccgaccgtatttgtcgccggtggttttgcgctggtggcgtgggcgaccggcaatatgaactttgccagctacttgcatataccgtatctgcgacacgccggggaactggttattgtctgtaccgcgatagtcggggcaggactgggcttcctgtggtttaacacctatccggcgcaggtctttatgggcgatgtaggtagcctggcgttaggtggtgcgttaggcattatcgccgtactgctacgtcaggaattcctgctggtgattatggggggcgtgttcgtggtagaaacgctttctgtcatcctgcaggtcggctcctttaaactgcgcggacaacgtattttccgcatggcaccgattcatcaccactatgaactgaaaggctggccggaaccgcgcgtcattgtgcgtttctggattattagcctgatgctggttctgattggtctggcaacgctgaaggtacgttaatcatggctgattatcagggtaaaaatgtcgtcattatcggcctgggcctcaccgggctttcctgcgtggactttttcctcgctcgcggtgtgacgccgcgcgttatggatacgcgtatgacaccgcctggcctggataaattacccgaagccgtagaacgccacacgggcagtctgaatgatgaatggctgatggcggcagatctgattgtcgccagtcccggtattgcactggcgcatccatccttaagcgctgccgctgatgccggaatcgaaatcgttggcgatatcgagctgttctgtcgcgaagcacaagcaccgattgtggcgattaccggttctaacggcaaaagcacggtcaccacgctagtgggtgaaatggcgaaagcggcgggggttaacgttggtgtgggtggcaatattggcctgcctgcgttgatgctactggatgatgagtgtgaactgtacgtgctggaactgagcagcttccagctggaaaccacctccagcttacaggcggtagcagcgaccattctgaacgtgactgaagatcatatggatcgctatccgtttggtttacaacagtatcgtgcagcaaaactgcgcatttacgaaaacgcgaaagtttgcgtggttaatgctgatgatgccttaacaatgccgattcgcggtgcggatgaacgctgcgtcagctttggcgtcaacatgggtgactatcacctgaatcatcagcagggcgaaacctggctgcgggttaaaggcgagaaagtgctgaatgtgaaagagatgaaactttccgggcagcataactacaccaatgcgctggcggcgctggcgctggcagatgctgcagggttaccgcgtgccagcagcctgaaagcgttaaccacattcactggtctgccgcatcgctttgaagttgtgctggagcataacggcgtacgttggattaacgatagcaaagcgaccaacgtcggcagtacggaagcggcgctgaatggcctgcacgtagacggcacactgcatttgttgctgggtggcgatggtaaaagcgcggactttagcccactggcgcgttacctgaatggcgataacgtacgtctgtattgtttcggtcgtgacggcgcgcagctggcggcgctacgcccggaagtggcagaacaaaccgaaactatggaacaggcgatgcgcttgctggctccgcgtgttcagccgggcgatatggttctgctctccccagcctgtgccagccttgatcagttcaagaactttgaacaacgaggcaatgagtttgcccgtctggcgaaggagttaggttgatgcgtttatctctccctcgcctgaaaatgccgcgcctgccaggattcagtatcctggtctggatctccacggcgctaaagggctgggtgatgggcagccgggaaaaagataccgacagcctgatcatgtacgatcgcaccttactgtggctgaccttcggcctcgcggcgattggctttatcatggtgaccagcgcgagtatgcccatagggcaacgcttaaccaacgatccgttcttcttcgcgaagcgtgatggtgtctatctgattttggcgtttattctggcgatcattacgctgcgtctgccgatggagttctggcaacgctacagtgccacgatgctgctcggatctatcatcctgctgatgatcgtcctggtagtgggtagcagcgttaaaggggcaagccgttggatcgatctcggtttgctgcgtatccagcctgcggagctgacaaaactgagcctgttttgctatatcgccaactatctggtgcgtaaaggcgacgaagtacgtaataacctgcgcggcttcctgaaaccgatgggcgtgattctggtgttggcagtgttactgctggcacagccagaccttggtacggtggtggtgttgtttgtgactacgctggcgatgttgttcctggcgggagcgaaattgtggcagttcattgccattatcggtatgggcattagtgcggttgtgttgctgatactcgccgaaccgtaccgtatccgccgtgttaccgcattctggaacccgtgggaagatccctttggcagcggctatcagttaacgcaaagcctgatggcgtttggtcgcggcgaactttgggggcaaggtttaggtaacagcgtacaaaaactggagtatctgccggaagcgcacactgactttattttcgccattatcggcgaagaactggggtatgtcggtgtggtgctggcacttttaatggtattcttcgtcgcttttcgcgcgatgagcattggccgtaaagcattagaaattgaccaccgtttttccggttttctcgcctgttctattggcatctggtttagcttccaggcgctggttaacgtaggcgcggcggcggggatgttaccgaccaaaggtctgacattgccgctgatcagttacggtggtagcagcttactgattatgagcacagccatcatgatgctgttgcgtattgattatgaaacgcgtctggagaaagcgcaggcgtttgtacgaggtagtcgatgagtggtcaaggaaagcgattaatggtgatggcaggcggaaccggtggacatgtattcccgggactggcggttgcgcaccatctaatggctcagggttggcaagttcgctggctggggactgccgaccgtatggaagcggacttagtgccaaaacatggcatcgaaattgatttcattcgtatctctggtctgcgtggaaaaggtataaaagcactgatagctgccccgctgcgtatcttcaacgcctggcgtcaggcgcgggcgattatgaaagcgtacaaacctgacgtggtgctcggtatgggaggctacgtgagtggtccaggtggtctggccgcgtggagcttaggcattccggttgtacttcatgaacaaaacggtattgcgggcttaaccaataaatggctggcgaagattgccaccaaagtgatgcaggcgtttccaggtgctttccctaatgcggaagtagtgggtaacccggtgcgtaccgatgtgttggcgctgccgttgccgcagcaacgtttggctggacgtgaaggtccggttcgtgtgctggtagtgggtggttctcagggcgcacgcattcttaaccagacaatgccgcaggttgctgcgaaactgggtgatagtgtcactatctggcatcagagcggcaaaggtagccaacaatccgttgaacaggcgtatgccgaagcggggcaaccgcagcataaagtgacggaatttattgatgatatggcggcggcgtatgcgtgggcggatgtcgtcgtttgccgctccggtgcgttaacggtgagtgaaatcgccgcggcaggactaccggcgttgtttgtgccgtttcaacataaagaccgccagcaatactggaatgcgctaccgctggaaaaagcgggcgcagccaaaattatcgagcagccacagcttagcgtggatgctgtcgccaacaccctggccgggtggagccgagaaaccttattaaccatggcagaacgcgcccgcgctgcatccattccggatgccaccgagcgagtggcaaatgaagtgagccgggttgcccgggcgtaattgtagcgatgccttttgcatcgtatgaatttaagaagttaatggcgtaaagaatgaatacacaacaattggcaaaactgcgttccatcgtgcccgaaatgcgtcgcgttcggcacatacattttgtcggcattggtggtgccggtatgggcggtattgccgaagttctggccaatgaaggttatcagatcagtggttccgatttagcgccaaatccggtcacgcagcagttaatgaatctgggtgcgacgatttatttcaaccatcgcccggaaaacgtacgtgatgccagcgtggtcgttgtttccagcgcgatttctgccgataacccggaaattgtcgccgctcatgaagcgcgtattccggtgatccgtcgtgccgaaatgctggctgagttaatgcgttttcgtcatggcatcgccattgccggaacgcacggcaaaacgacaaccaccgcgatggtttccagcatctacgcagaagcggggctcgacccaaccttcgttaacggcgggctggtaaaagcggcgggggttcatgcgcgtttggggcatggtcggtacctgattgccgaagcagatgagagtgatgcaagcttcctgcatctgcaaccgatggtggcgattgtcaccaatatcgaagccgaccacatggatacctaccagggcgactttgagaatttaaaacagacttttattaattttctgcacaacctgccgttttacggtcgtgcggtgatgtgtgttgatgatccggtgatccgcgaattgttaccgcgagtggggcgtcagaccacgacttacggcttcagcgaagatgccgacgtgcgtgtagaagattatcagcagattggcccgcaggggcactttacgctgctgcgccaggacaaagagccgatgcgcgtcaccctgaatgcgccaggtcgtcataacgcgctgaacgccgcagctgcggttgcggttgctacggaagagggcattgacgacgaggctattttgcgggcgcttgaaagcttccaggggactggtcgccgttttgatttcctcggtgaattcccgctggagccagtgaatggtaaaagcggtacggcaatgctggtcgatgactacggccaccacccgacggaagtggacgccaccattaaagcggcgcgcgcaggctggccggataaaaacctggtaatgctgtttcagccgcaccgttttacccgtacgcgcgacctgtatgatgatttcgccaatgtgctgacgcaggttgataccctgttgatgctggaagtgtatccggctggcgaagcgccaattccgggagcggacagccgtagcctgtgtcgcacaattcgtggacgtgggaaaattgatcccattctggtgccggatccggcgcgggtagccgagatgctggcaccggtattaaccggtaacgacctgattctcgttcagggggctggtaatattggaaaaattgcccgttctttagctgaaatcaaactgaagccgcaaactccggaggaagaacaacatgactgataaaatcgcggtcctgttgggtgggacctccgctgagcgggaagtttctctgaattctggcgcagcggtgttagccggactgcgtgaaggcggtattgacgcgtatcctgtcgacccgaaagaagtcgacgtgacgcaactgaagagcatgggctttcagaaagtgtttatcgcgctacacggtcgcggcggtgaagatggtacgctgcaggggatgctcgagctgatgggcttgccttataccggaagcggagtgatggcatctgcgcttagtatggataaactacgcagcaaacttctatggcaaggtgccggtttaccggtcgcgccgtgggtagcgttaacccgcgcagagtttgaaaaaggcctgagcgataagcagttagcagaaatttctgctctgggtttgccggttatcgttaagccgagccgcgaaggttccagtgtgggaatgagtaaagtagtagcagaaaatgctctacaagatgcattaagattggcatttcagcacgatgaagaagtattgattgaaaaatggctaagtgggccggagttcacggttgcgatactcggtgaagaaattttaccgagtatacgtattcaaccgtccggaaccttctatgattatgaggcgaagtatctctctgatgagacacagtatttctgccccgcaggtctggaagcgagtcaagaggccaatttgcaggcattagtgctgaaagcatggacgacgttaggttgcaaaggatggggacgtattgacgttatgctggacagcgatggacagttttatctgctggaagccaataccagtccgggtatgaccagccacagcctggtgccgatggcggcacgtcaggcaggtatgagcttcagccagttggtagtacgaattctggaactggcggactaatatgagccaggctgctctgaacacgcgaaacagcgaagaagaggtttcttctcgccgcaataatggaacgcgtctggcggggatccttttcctgctgaccgttttaacgacagtgttggtgagcggctgggtcgtgttgggctggatggaagatgcgcaacgcctgccgctcagtaagctggtgttgaccggtgaacgccattacacacgtaatgacgatatccggcagagcatcctggcattgggtgagccgggtacctttatgacccaggatgtcaacatcatccagacgcaaatagaacaacgcctgccgtggattaagcaggtgagcgtcagaaagcagtggcctgatgaattgaagattcatctggttgaatatgtgccgattgcgcggtggaatgatcaacatatggtagacgcggaaggaaataccttcagcgtgccgccagaacgcaccagcaagcaggtgcttccaatgctgtatggcccggaaggcagcgccaatgaagtgttgcagggctatcgcgaaatggggcagatgctggcaaaggacagatttactctgaaggaagcggcgatgaccgcgcggcgttcctggcagttgacgctgaataacgatattaagctcaatcttggccggggcgatacgatgaaacgtttggctcgctttgtagaactttatccggttttacagcagcaggcgcaaaccgatggcaaacggattagctacgttgatttgcgttatgactctggagcggcagtaggctgggcgcccttgccgccagaggaatctactcagcaacaaaatcaggcacaggcagaacaacaatgatcaaggcgacggacagaaaactggtagtaggactggagattggtaccgcgaaggttgccgctttagtaggggaagttctgcccgacggtatggtcaatatcattggcgtgggcagctgcccgagccgtggtatggataaaggcggggtgaacgacctcgaatccgtggtcaagtgcgtacaacgcgccattgaccaggcagaattgatggcagattgtcagatctctagcgtatatctggcgctttctggtaagcacatcagctgccagaatgaaattggtatggtgcctatttctgaagaagaagtgacgcaagaagatgtggaaaacgtcgtccataccgcgaaaagcgtgcgtgtgcgcgatgagcatcgtgtgctgcatgtgatcccgcaagagtatgcgattgactatcaggaagggatcaagaatccggtaggacttagcggcgtgcggatgcaggcaaaagtgcacctgatcacatgtcacaacgatatggcgaaaaacatcgtcaaagcggttgaacgttgtgggctgaaagttgaccaactgatatttgccggactggcaagtagttatagcgtattgacggaagatgaacgtgaactgggtgtctgcgtcgtcgatatcggtggtggtacaatggatatcgccgtttataccggtggggcattgcgccacactaaggtaattccttatgctggcaatgtcgtgaccagtgatatcgcttacgcctttggcacgccgccaagcgacgccgaagcgattaaagttcgccacggttgtgcgctgggttccatcgttggaaaagatgagagcgtggaagtgccgagcgtaggtggtcgtccgccacggagtctgcaacgtcagacactggcagaggtgatcgagccgcgctataccgagctgctcaacctggtcaacgaagagatattgcagttgcaggaaaagcttcgccaacaaggggttaaacatcacctggcggcaggcattgtattaaccggtggcgcagcgcagatcgaaggtcttgcagcctgtgctcagcgcgtgtttcatacgcaagtgcgtatcggcgcgccgctgaacattaccggtttaacggattatgctcaggagccgtattatagcacggcggtgggattgcttcactatgggaaagagagtcatcttaacggtgaagctgaagtagaaaaacgtgttacagcaagtgttggcagctggatcaagcgactcaatagttggctgcgaaaagagttttaatttttatgaggccgacgatgattacggcctcaggcgacaggcacaaatcggagagaaactatgtttgaaccaatggaacttaccaatgacgcggtgattaaagtcatcggcgtcggcggcggcggcggtaatgctgttgaacacatggtgcgcgagcgcattgaaggtgttgaattcttcgcggtaaataccgatgcacaagcgctgcgtaaaacagcggttggacagacgattcaaatcggtagcggtatcaccaaaggactgggcgctggcgctaatccagaagttggccgcaatgcggctgatgaggatcgcgatgcattgcgtgcggcgctggaaggtgcagacatggtctttattgctgcgggtatgggtggtggtaccggtacaggtgcagcaccagtcgtcgctgaagtggcaaaagatttgggtatcctgaccgttgctgtcgtcactaagcctttcaactttgaaggcaagaagcgtatggcattcgcggagcaggggatcactgaactgtccaagcatgtggactctctgatcactatcccgaacgacaaactgctgaaagttctgggccgcggtatctccctgctggatgcgtttggcgcagcgaacgatgtactgaaaggcgctgtgcaaggtatcgctgaactgattactcgtccgggtttgatgaacgtggactttgcagacgtacgcaccgtaatgtctgagatgggctacgcaatgatgggttctggcgtggcgagcggtgaagaccgtgcggaagaagctgctgaaatggctatctcttctccgctgctggaagatatcgacctgtctggcgcgcgcggcgtgctggttaacatcacggcgggcttcgacctgcgtctggatgagttcgaaacggtaggtaacaccatccgtgcatttgcttccgacaacgcgactgtggttatcggtacttctcttgacccggatatgaatgacgagctgcgcgtaaccgttgttgcgacaggtatcggcatggacaaacgtcctgaaatcactctggtgaccaataagcaggttcagcagccagtgatggatcgctaccagcagcatgggatggctccgctgacccaggagcagaagccggttgctaaagtcgtgaatgacaatgcgccgcaaactgcgaaagagccggattatctggatatcccagcattcctgcgtaagcaagctgattaagaattgactggaatttgggtttcgaggctctttgtgctaaactggcccgccgaatgtatagtacacttcggttggataggtaatttggcgagataatacgatgatcaaacaaaggacacttaaacgtatcgttcaggcgacgggtgtcggtttacataccggcaagaaagtcaccctgacgttacgccctgcgccggccaacaccggggtcatctatcgtcgcaccgacttgaatccaccggtagatttcccggccgatgccaaatctgtgcgtgataccatgctctgtacgtgtctggtcaacgagcatgatgtacggattagtaccgtagagcacctcaatgctgctctcgcgggcttgggcatcgataacattgttatcgaagttaacgcgccggaaatcccgatcatggacggcagcgccgctccgtttgtatacctgctgcttgacgccggtatcgacgagttgaactgcgccaaaaaatttgttcgcatcaaagagactgttcgtgtcgaagatggcgataagtgggctgaatttaagccgtacaatggttttagcctggatttcaccatcgattttaaccatccggctattgattccagcaaccagcgctatgcgatgaacttctccgctgatgcgtttatgcgccagatcagccgtgcgcgtacgttcggtttcatgcgtgatatcgaatatctgcagtcccgtggtttgtgcctgggcggcagcttcgattgtgccatcgttgttgacgattatcgcgtactgaacgaagacggcctgcgttttgaagacgaatttgtgcgtcacaaaatgctcgatgcgatcggtgacttgttcatgtgtggtcacaatattattggtgcatttaccgcttataaatccggtcatgcactgaataacaaactgctgcaggctgtcctggcgaaacaggaagcctgggaatatgtgaccttccaggacgacgcagaactgccgttggccttcaaagcgcctagtgctgtactggcataacgacatttatactgtcgtataaaattcgactggcaaatctggcactctctccggccaggtgaaccagtcgtttttttttgaattttataagagctataaaaaacggtgcgaacgctgttttcttaagcacttttccgcacaacttatcttcattcgtgctgtggactgcaggctttaatgataagatttgtgcgctaaatacgtttgaatatgatcgggatggcaataacgtgagtggaatactgacgcgctggcgacagtttggtaaacgctacttctggccgcatctcttattagggatggttgcggcgagtttaggtttgcctgcgctcagcaacgccgccgaaccaaacgcgcccgcaaaagcgacaacccgcaaccacgagcctagtgccaaagttaactttggtcaattggccttgctggaagcgaacacacgccgcccgaatagcaactattccgttgattactggcatcaacatgccattcgcacggtaatccgtcatctttctttcgcaatggcaccgcaaacactgcccgttgctgaagaatctttgcctcttcaggcgcaacatcttgcattactggatacgctcagcgcgctgctgacccaggaaggcacgccgtctgaaaagggttatcgcattgattatgcgcattttaccccacaagcaaaattcagcacgcccgtctggataagccaggcgcaaggcatccgtgctggccctcaacgcctcacctaacaacaataaacctttacttcattttattaactccgcaacgcggggcgtttgagattttattatgctaatcaaattgttaactaaagttttcggtagtcgtaacgatcgcaccctgcgccggatgcgcaaagtggtcaacatcatcaatgccatggaaccggagatggaaaaactctccgacgaagaactgaaagggaaaaccgcagagtttcgtgcacgtctggaaaaaggcgaagtgctggaaaatctgatcccggaagctttcgccgtggtacgtgaggcaagtaagcgcgtctttggtatgcgtcacttcgacgttcagttactcggcggtatggttcttaacgaacgctgcatcgccgaaatgcgtaccggtgaaggaaaaaccctgaccgcaacgctgcctgcttacctgaacgcactaaccggtaaaggcgtgcacgtagttaccgtcaacgactacctggcgcaacgtgacgccgaaaacaaccgtccgctgtttgaattccttggcctgactgtcggtatcaacctgccgggcatgccagcaccggcaaagcgcgaagcttacgcagctgacatcacttacggtacgaacaacgaatacggctttgactacctgcgcgacaacatggcgttcagccctgaagaacgtgtacagcgtaaactgcactatgcgctggtggacgaagtggactccatcctgatcgatgaagcgcgtacaccgctgatcatttccggcccggcagaagacagcagcgaaatgtataaacgcgtgaataaaattattccgcacctgatccgtcaggaaaaagaagactccgaaaccttccagggcgaaggccacttcagcgtggacgaaaaatctcgccaggtgaacctgaccgaacgtggtctggtgctgattgaagaactgctggtgaaagagggcatcatggatgaaggggagtctctgtactctccggccaacatcatgctgatgcaccacgtaacggcggcgctgcgcgctcatgcgctgtttacccgtgacgtcgactacatcgttaaagatggtgaagttatcatcgttgacgaacacaccggtcgtaccatgcagggccgtcgctggtccgatggtctgcaccaggctgtggaagcgaaagaaggtgtgcagatccagaacgaaaaccaaacgctggctagcatcaccttccagaactacttccgtctgtatgaaaaactggcggggatgaccggtactgctgataccgaagctttcgaatttagcagtatctacaagctggataccgtcgttgttccgaccaaccgtccaatgattcgtaaagatctgccggacctggtctacatgactgaagcggaaaaaattcaggcgatcattgaagatatcaaagaacgtactgcgaaaggccagccggtgctggtgggtactatctccatcgaaaaaagcgagctggtgagtaacgaactgaccaaagccggtattaagcacaacgtcctgaacgccaaattccacgccaacgaagcggcgattgttgctcaggcaggttatccggctgcggtgactatcgcgaccaatatggcgggtcgtggtacagatattgtgctcggtggtagctggcaggcagaagttgccgcgctggaaaatccgaccgcagagcaaattgaaaaaattaaagccgactggcaggtacgtcacgatgcggtactggaagcaggtggcctgcatatcatcggtaccgagcgtcacgaatcccgtcgtatcgataaccagttgcgcggtcgttctggtcgtcagggggatgctggttcttcccgtttctacctgagcatggaagatgcgctgatgcgtatttttgcttccgaccgagtatccggcatgatgcgtaaactgggtatgaagccaggcgaagccattgaacacccgtgggtgactaaagcgattgccaacgcccagcgtaaagttgaaagccgtaacttcgacattcgtaagcaactgctggaatatgatgacgtggctaacgatcagcgtcgcgccatttactcccagcgtaacgaactgttggatgtcagcgatgtgagcgaaaccattaacagcattcgtgaagatgtgttcaaagcgaccattgatgcctacattccaccacagagcctggaagaaatgtgggatattccggggctgcaggaacgtctgaagaacgatttcgacctcgatttgccaattgccgagtggctggataaagaaccagaactgcatgaagagacgctgcgtgagcgcattctggcgcagtccatcgaagtgtatcagcgtaaagaagaagtggttggtgctgagatgatgcgtcacttcgagaaaggcgtcatgctgcaaacgcttgactccctgtggaaagagcacctggcagcgatggactatctgcgtcagggtatccacctgcgtggctacgcacagaaagatccgaagcaggaatacaaacgtgaaagcttctccatgtttgcagcgatgctggagagcttgaaatatgaagttatcagtacgctgagcaaagttcaggtacgtatgcctgaagaggttgaggagctggaacaacagcgtcgtatggaagccgagcgtttagcgcaaatgcagcagcttagccatcaggatgacgactctgcagccgcagctgcactggcggcgcaaaccggagagcgcaaagtaggacgtaacgatccttgcccgtgcggttctggtaaaaaatacaagcagtgccatggccgcctgcaataaaagctaactgttgaagtaaaaggcgcaggattctgcgccttttttataggtttaagacaatgaaaaagctgcaaattgcggtaggtattattcgcaacgagaacaatgaaatctttataacgcgtcgcgcagcagatgcgcacatggcgaataaactggagtttcccggcggtaaaattgaaatgggtgaaacgccggaacaggcggtggtgcgtgaacttcaggaagaagtcgggattaccccccaacattttagcctatttgaaaaactggaatatgaattcccggacaggcatataacactgtggttttggctggtcgaacgctgggaaggggagccgtggggtaaagaagggcaacccggtgagtggatgagcctggtcggtcttaatgccgatgattttccgccagccaatgaaccggtaattgcgaagcttaaacgtctgtaagtcagataaggcgttttcgccgcatccgacattcgcacacgatgcctgatgcgacgctggcgcgtcttatcaggcctaaagggatttctaactcattgataaatttgtttttgtaggtcggataaggcgttcacgccgcatccgacatttgcacaagatgcctgatgcgacgctgtccgcgtcttatcaggcctacgtgcggcatcagacaaatgtcactgctttggttcttcgctccagtcatcgctttcggaaagatcgccactgctggggattcgtttttcttcagcagcccattctccgaggtcgatcagctgacaacgtttggagcaaaatggccgaaacgggctgatttcaccccacaccaccgttttcccgcaggttgggcaattcaccgtaatagtttcactcatttttactccttagcaacaggccagttcgaaatccagacgttccggtacctgtccgttttcagtgtccagcggcataaaacgaatggcaaaacggctcttatgtccggaaatttgcggataaagctgactatcgaggctcagattcaggcgcagcaagtcggcatcgccaccgttatcctgataaaaaccattcaggctggtttgtttacggaagggggcgctctggcgaattaaatccagcaccatggtaagtgcctgggtgagcgggttcaggctggcaatccaggtttctacctggctgtcgcgctgcgcctggggtagatgcagccaaatgtgcaatgtaggtaaatcaaagctgcaacagccgcctgggatgctcagtcgctgacgcaccagagcaatcaaacgatcttcacgcagaaattgcccgatacgcggcgcggaaattaatacgctccccgccgcttttaactgctgaattaatgcttcaatacggctctggtccacgccaggcacgccaatccaggtctggagtttacgttgctgccggtcaagttctttcaacagctcagtgcggacttcgccgcgctcgaaaacatccagtaattcactgacattacggaagaaatgcagcgcgccagcgtggtcaacgatgggtaaattaacggtgagttgctgaatcaaaaactcaatgcgcagccatgtacgcattttttcatttagtggatgttcaaaaaggacctgggtctgcattacggtttttcctgactgacaaactggctcgcaagctgcaaatagtgtgcgtgcaggcgggcaacatcgcttgcgatagcatccggtgcgccgttattatcaatgacgtcatctgccacggcaaggcgggcttcgcgcgttgcctgagcagcaaggatttgttcgacatgctcgcgagttacatcatcgcgctgcatggtgcgcttaagttgcgtttctgggctgacatccaccacaagcactcgattcgcttttttatacagactgttttctaccagcaatggcacaacccacagtacatagggggaagtagcttgctggatctggtgttgcgtctcttgctgaatcagcggatgcagcagggcgttaagccagtttttctcttccgggttggcgaagatccgctcgcgcaaggcccggcgctgcaatgttccatcagcagcaatcatgttagcgccaaagtgatcagcaatggcatgtagcgcaggtgcacctggttcaaccacctgacgcgcaataatatcggcatcaatgacgttaattccgagatcagcaaacgcattggcaacggtactcttgccactgccaatgcctcccgttaaggcaactatatacctcataatttatattcccgggaattcatcatgattatcaaaacgttaaaaatgagtgcacgaaagcgaaattgatgaaacgttcgctcactatttaccaggtaaatttatgggattgtagcgtaaaaaaagacaatttcgcagtcttgcgccgcattgattagtgcgtatgatagcgtcactggagttgcgctcttacccttatagccattaaccccaggaatccgcacatgcgtattgaagaagatctgaagttaggttttaaagacgttctcatccgccctaaacgctccactcttaaaagccgttccgatgttgaactggaacgtcaattcaccttcaaacatagtggtcagagctggtccggcgtgccgattatcgccgcaaatatggacaccgtaggcacattttctatggcctctgcgctggcttcttttgatattttgactgctgtgcataaacactattctgtcgaagagtggcaagcgtttatcaacaattcttccgctgatgtgctgaaacatgtgatggtttctaccggtacgtctgatgcggatttcgaaaaaactaaacagattctcgacctgaacccggcattaaacttcgtttgtattgacgtggcgaatggttattccgaacacttcgtgcagttcgttgcgaaagcgcgtgaagcgtggccgaccaaaaccatttgtgctggtaacgtagtgactggtgaaatgtgtgaggagcttatcctcagtggtgccgatatcgttaaagttggcattggcccaggttctgtttgtacaactcgcgtcaaaacaggcgtcggttatccgcaactttctgcggtaatcgaatgtgccgatgctgcgcacggtctgggcggaatgatcgtcagcgatggtggctgcaccacgccgggcgatgtggcgaaagcctttggcggcggtgccgatttcgtcatgcttggcggcatgctggcgggccacgaagagagcggcggtcgcatcgttgaggagaacggcgagaaatttatgctgttctacggcatgagctccgagtctgcgatgaaacgtcacgttggcggcgttgcggaatatcgcgcagcagaaggtaaaaccgttaagctgccgctgcgaggcccggttgaaaataccgcgcgagatattttgggcggcctgcgtagtgcttgtacatacgttggggctagtcgcctgaaagagctgaccaagcgcaccacgtttattcgtgtgcaggaacaagaaaaccgcatcttcaacaacctgtaatctcccaacgctggcgtggagcaacacgccagcgttatcccatcccactcatcgcatcgcctaaatggaaaattggcagatacattgccaccaccagcgtaccaataattcctcccgttatgatcagcaacgccggttccagtaaggctgcgaggttatccgccagcgccattgtgttttcccgatgatgatgggcgaggttgtctaacatgagatccagagagccggatgcctctcctgttctcactaattgcaaacagagcgggctaaactcaccggtattttttagcgccagccagatgggttgaccgttactgatatcgtgctggatttgtgtcagaagttgcacccagtacgggcagcgcattgtttctctgacgctctctacgccctgtaaaaaagtaatgcctgcactttgtgtcagcgccagaatcgtaaagatctgcgtgagtttttgtccccgcatcagactacccataatcgggatgcgtaacagcaatttctgccgcactataagccaggtcggtcggcgcatcagcaacttattggctatcgccagcagaaagccgaacaacaccagcagccagctccattcgccactaaagtctgccagcgtcatgatcccctgcgttagtgccggtagtggggtgttgaaggtcttatagatagcggcaaactccggcagaacaaaatgcagcattgccacaaccaccatgattgccatcgctaaaatgatgatgggataacgtaacgcacttttcactttgtcggtcaactgacgctgggctttttgctgacgcgccagttcaaagcagcattcatccagcttaccggtcagttcacccgtgcggatcatcgcctgatagagcggcggaaatacctcactccagggtaataaggcattggaaaaagcaatgccctgttcgagatcgtgcgccaggctttgcagcaacgcttgccattgcttactgggatgctgttccgccagcagagccagcccttcagaaagcgttaaccctgctttgagtagcgtcgccagttgatgaatgacttccgcgcttttatctcctcgccactgcgcagaattgatggcgattcgcttcaggcttagtggggtaaccatctgttgctgtagtgccataagcagtaaagtacggctctctgcccatagcatcccatcttgcgcattgccgtcgccggttatgccatgccagcgccagagttgcttactcgccatgcggcatccccagtacgcggattaactcttcaaaggtggttaagccttgctctacggccaggcagccgttttcaaaaagcgtacgcatacccgcctgtcgtgcgtgcgtttccaggctttcaacgtcggtattagcggaaataagctgacgaatgaccggcgttatgggcagaacttcaaataaggccgtacgaccataaaaaccgtggtagcaatgtacacaaccgggtgcctgccagtggggcagcgggcttggccatacattgtctggaatgtggatgggctccccttgctgccggcgacaatgtgggcaaagtttgcgtaccagacgctgggctattaccagcgtaagcgcgctacttagcatccagcgggcgacccccatttgctgtaaacgtaccagcgtttcgcaggtggaattagtgtgtagggtagacaacaccaggtgaccagtttgcgccgctttaatagcgatctctgctgtttcgccatcgcggatctctccgatcatgatgacgtcaggatcctggcgcaataacgcacgcaaaacgccctgaaaggtgagtccggcacgcggatggatttgcgtctggtttagtccggctatggggatctcaactggatcttcgacgctacaaatattaatgtcagcggtattcagcttttgcagggcactataaagcgtgaccgttttgccgctgccggtagggccagttaccagcaccagtccctgtggttgttgcaaggcatgagcaaagtccgccagttgtaacggctgcattccaagcgtgttgacatccagtgcctgacccacctgctgtaacaaccttaataccaccttttcaccaccccgacatggtaaggtcgcaatacgaaaactgacggcgtttcctgccagttcgacagtgaattgcccgtcctgcggcaggcgatgttccgcaatatccaggtttcccagcacttttaatctggcggttaatgcgactccggcatccggactaacatccggtaaaggatgcaatacgccgtcgatacgcaagcggatgcggtaggcattgtccgctggttcgatatgaatatcagacgcgcgttgttccagcgcagattgtaacgttcgagttagcaactctgctttgggctgatgcttctcctgaacagctacgggcagtgtctgttgtgtgcgactggcgtgaccttccatttgttggcgcgtccagcaggtgatctcaatacgtttggtggtagcgaaatgcaatgcgtccagtagctcatggctaggtgcatcgactaccgcaacatgaaccacctcttcgctggcatccagcaagactccatgataacgcagacacagggcagtgagctgtggaatattcattgccgctccttagttggcgtcatcaaagcggaagacatcttcgcaggcttgctgcaatgcgctgtcactttgaatattgcagttgcgcgtccagccggtgacgccgtttgcgttatcccaacccggtgtcatgacgacgcttagcccattgagactttcttgcccggtcaggctcaccacgccctttgccacactcatggcactaacatagcgggtggtggtagggctgggaatgccattgctgccaccgtcgcaggtatctaatccaccatgttccagcgcgcacaactctacggcggtacggtaaggcacaaaggtttgtagcatgtcggtgagtgcggctttgcgcaggtagttttgataagcgggaataccaatggcgcttaaaatggcaatgatgccaataaccaccatcagttcgataagtgtaaaaccgcgttgcttgtccatctgtttcgctccttgatttggttggcgctactttggcaaacgccatcagcacaggcgaggggcaaaaaacgaaacgggaaagcagattccgaggttttttatttcgttgcagcgaaagacaagaaatttgcgaggcgttacgaagaaagttggggaaggggagattatccgcccgcgatggagcggataaatctgtcaactattagcgaaaacgcatactaaggtcgagtgcttgtacgtgtttagttagcgcaccgacggagataaagtccacgcccgtttcggcaaattcacgcagtgttttgtcagtgacgttgccagacacttccagtagcgccttgccgttggtgcgtttgacggcttcgcgcatctgttctgtttcgaagttatccagcatgatgatatcggctcctgctttcagggcttcatcaagttcttccagattctctacttcgacttctactggcgcatccgggtgcagccaggacgctttttcgaccgcctggcgcacactgccggaggcaataatatggttttctttgatcaggaaggcatcagaaagccccagacggtgattcgctccgccgccgcaaagtaccgcgtatttcagagcactacgcaggccgggtaaggttttgcgcgtatccaacaactgcgtgttggtgccttccagcaattcgacatagtggcgtaccttactggcaactccactaagggtttgcacaaaattaagcgcagtgcgttcgcccgttaacagcacgcgggatgggccttcaagttcgaacaaggattgattggcattgatgacatcgccgtcatccacatgccagattatggtgacatcgtcgcctgccagttgaataaacacctcttcaacccagcgtttgccgcaaaagacgccattctcgcgggtgatcaccgtggcatgagagcgagaattttccggtaaaagttttgccgtaatatcattgttggcatcgactgttccgcctaaatcttcccgcagcgcctgggccaccgcgccggggatatcgagattaatgcgttccagcagctcgtcacgtcgggtgtcagggttatagcggcgaggcggcatgttaaaactccagatagctaacgaatcataaggtagaaacatgctactctgaaccgggtattagcaccacatataaggagatcctgcatgttgttagaacaggggtggctggttggcgcgcgccgcgttcccagtccacattacgattgccgcccggatgacgaaacacccaccctgctggtggtgcacaatattagcctgccgccaggcgagtttggcggtccgtggatcgacgcattattcactggaactattgatccgcaggcacatcctttctttgctgagatcgcccatttgcgcgtctccgctcactgtttgattcgccgtgatggtgaaatagtccagtatgttcctttcgataaacgtgcatggcatgcgggagcctctcagtatcaggggcgcgaacgctgcaatgatttttctattgggattgagcttgaaggcaccgatacgctggcgtataccgatgcgcagtatcaacagcttgcggcggttacgcgggcactgattgattgctatccggatatcgctaaaaacatgacgggccattgtgatattgcgccggatcggaaaaccgatcccggtcctgcatttgattgggcacggtttcgtgtgctggtcagcaaggagacaacatgacgctatttacaaccttactggtgttaattttcgagcgcctgtttaagttgggcgagcactggcagcttgatcatcgtcttgaagcgttctttcggcgggtgaaacatttttctctcgggcgcacgttaggcatgaccattattgcgatgggcgtgacttttttactgttacgcgcattgcagggagtattgttcaacgttcccacgctactggtgtggctgctgattggtttgctgtgtattggcgcaggtaaagttcgtcttcattatcatgcttatctgacagctgctagtcgtaatgatagccatgcccgtgccacgatggctggcgaactcaccatgattcacggcgtcccggcaggctgcgacgaacgtgagtatttgcgtgagctgcaaaatgcattgctgtggattaactttcgtttttatcttgcaccgctgttctggctgattgtggggggaacctggggacccgttacgctgatggggtatgcgtttttgcgtgcatggcaatactggctggcgcgatatcagacgccgcatcatcgtttacagtccggcattgatgccgtgcttcatgtactggattgggtgccggttcgtcttgcgggtgtggtatatgccttgatcggtcatggtgagaaagcgttaccggcctggtttgctagcctgggtgatttccatactagccagtatcaggtgttaacgcgtctggcgcagttctctctggcgcgtgaaccgcatgtcgataaggtggagacgccgaaggcagcggttagtatggcgaagaaaaccagcttcgtggtcgtggtggtgattgcactactgacgatttacggggcgttggtgtaaagattattgccctcaccctgtacgggtgagggcgtagagagattaatgcgcttttacggctttggcggttttctctttaaacagatagccgatacctaacacgatcagccataccgggatcaggtatacgctaatcgccattcctggggtcatcagcataatcaccagtaccgccgccataaacagcaggcagatccagttacccagcggataaagcagagcagggaagcgagttaccacgccttgttcctgcttggcgcgacggaatttcatatgcgccaggctaatcatcgcccagttgattaccagtgcagataccaccagcgccattaacagtccgaaagcggactctggggcaaggtagttaatcagtacgcacaacgccgttaccagtgcagacaccagaatggtatttactggtacaccacgtttatcgacagacgccagcgcttttggcgcattaccctgttgtgccagaccaaacagcatacggctgttgcaatatacgcagctgttgtacacggagagcgccgcagtcagtaccacgatgttcagcgcattcgccacaaaggtatcgcctaactcgtggaagatcagcacaaacggactggtatcggcggtaacgcgggtccacggcatcagactgagcagaacggctaagctaccaatatagaaaatcaggatgcggtagataacctggttagttgctttcggtatactttgctccgggttatcagcttctgctgcggtgatccccaccagttccagaccaccgaagctgaacatgataatcgccatcatcatcaccagcccggtgaagccgtgcggcaggaaaccaccctgatcccacaggttgctaacggtcgcctgcgggccgccgttgccactgaatagcagccagccgccgaagatgatcatcgctaccaccgcgataactttgataatggcaaaccagaactccatctcgccaaacactttaacgttggtcaggttgatggcgttaatcaccacaaagaatacggcggcagaaacccaggtggggatttccggataccagaactgaatgtatttacccacggcagtcagctcagccatggcaactaaaacgtacagtacccagtagttccagccagaggcgaaaccggcaaaactgccccagtatttataagcaaagtggctaaaggagcctgcgacaggttcttcgaccaccatttcacccagctgacgcatgatcagaaaggcgataaaaccagcaatggcgtaacccaggataatccctggccctgcggactgtattacggaggcgctacccaggaataacccggtccctatcgcgccacccagcgcgataagctgaatatggcggtttttaaggccgcgctttagctgctcgccgtgctgttgaccttccatcatgaaacctcgtgcggtggttgtttttttgatctacgcagtgatgcgtgtgtaagtttgcaattccgtttgttgtattaatttgtttacatcaaagaagtttgaattgttacaaaaagacttccgtcagatcaagaataatggtatgcggcagcgaatgcacccgctttatgcatggttgaagatgagttgcttaaaaagaaaccgtttgtaaagctcagcctcaacccctctcaatatgtagaatgaatttaaattcgttttaattgaattaaaaatcacaaaattggtaagtgaatcggttcaattcggatttttatagtttaataatcgttaaaaaactcctttcctacgtaaagtctacatttgtgcatagttacaactttgaaacgttatatatgtcaagttgttaaaatgtgcacagtttcatgatttcaatcaaaacctgtatggacataaggtgaatactttgttactttagcgtcacagacatgaaattggtaagaccaattgacttcggcaagtggcttaagacaggaactcatggcctacagcaaaatccgccaaccaaaactctccgatgtgattgagcagcaactggagtttttgatcctcgaaggcactctccgcccgggcgaaaaactcccaccggaacgcgaactggcaaaacagtttgacgtctcccgtccctccttgcgtgaggcgattcaacgtctcgaagcgaagggcttgttgcttcgtcgccagggtggcggcacttttgtccagagcagcctatggcaaagcttcagcgatccgctggtggagctgctctccgaccatcctgagagtcagtatgacttgctcgaaacacgacacgccctggaaggtatcgccgcttattacgccgcgctgcgtagtaccgatgaagacaaggaacgcatccgtgaactccaccacgccatagagctggcgcagcagtctggcgatctggacgcggaaagtaacgccgtactccagtatcagattgccgtcaccgaagcggcccacaatgtggttctgcttcatctgctaaggtgtatggagccgatgttggcccagaatgtccgccagaacttcgaattgctctatagccgtcgcgagatgctgccgctggtgagtagtcaccgcacccgcatatttgaagcgattatggccggtaagccggaagaagcgcgcgaagcaagccatcgccatctggcctttatcgaagaaattttgctcgacagaagtcgtgaagagagccgccgtgagcgttctctgcgtcgtctggagcaacgaaagaattaatgatttttctggtaaaaattatccagaagatgttgtaaatcaagcgcatataaaagcgcggcaactaaacgtagaacctgtcttattgagctttccggcgagagttcaatgggacaggttccagaaaactcaacgttattagatagataaggaataacccatgagtgaacgtttcccaaatgacgtggatccgatcgaaactcgcgactggctccaggcgatcgaaagcgtcatccgtgaagaaggtgttgagcgtgctcagtatctgatcgaccaactgcttgctgaagcccgcaaaggcggtgtaaacgtagccgcaggcacaggtatcagcaactacatcaacaccatccccgttgaagaacaaccggagtatccgggtaatctggaactggaacgccgtattcgtagtgctatccgctggaacgccatcatgacggtgctgcgtgcgagcaaaaaagacctcgaactgggcggccatatggcgtccttccagtcttccgcaaccatttatgatgtgtgctttaaccacttcttccgtgcacgcaacgagcaggatggcggcgacctggtttacttccagggccacatctccccgggcgtgtacgctcgtgctttcctggaaggtcgtctgactcaggagcagctggataacttccgtcaggaagttcacggcaatggcctctcttcctatccgcacccgaaactgatgccggaattctggcagttcccgaccgtatctatgggtctgggtccgattggtgctatttaccaggctaaattcctgaaatatctggaacaccgtggcctgaaagatacctctaaacaaaccgtttacgcgttcctcggtgacggtgaaatggacgaaccggaatccaaaggtgcgatcaccatcgctacccgtgaaaaactggataacctggtcttcgttatcaactgtaacctgcagcgtcttgacggcccggtcaccggtaacggcaagatcatcaacgaactggaaggcatcttcgaaggtgctggctggaacgtgatcaaagtgatgtggggtagccgttgggatgaactgctgcgtaaggataccagcggtaaactgatccagctgatgaacgaaaccgttgacggcgactaccagaccttcaaaagcaaagatggtgcgtacgttcgtgaacacttcttcggtaaatatcctgaaaccgcagcactggttgcagactggactgacgagcagatctgggcactgaaccgtggtggtcacgatccgaagaaaatctacgctgcattcaagaaagcgcaggaaaccaaaggcaaagcgacagtaatccttgctcataccattaaaggttacggcatgggcgacgcggctgaaggtaaaaacatcgcgcaccaggttaagaaaatgaacatggacggtgtgcgtcatatccgcgaccgtttcaatgtgccggtgtctgatgcagatatcgaaaaactgccgtacatcaccttcccggaaggttctgaagagcatacctatctgcacgctcagcgtcagaaactgcacggttatctgccaagccgtcagccgaacttcaccgagaagcttgagctgccgagcctgcaagacttcggcgcgctgttggaagagcagagcaaagagatctctaccactatcgctttcgttcgtgctctgaacgtgatgctgaagaacaagagcatcaaagatcgtctggtaccgatcatcgccgacgaagcgcgtactttcggtatggaaggtctgttccgtcagattggtatttacagcccgaacggtcagcagtacaccccgcaggaccgcgagcaggttgcttactataaagaagacgagaaaggtcagattctgcaggaagggatcaacgagctgggcgcaggttgttcctggctggcagcggcgacctcttacagcaccaacaatctgccgatgatcccgttctacatctattacagcatgttcggcttccagcgtattggcgatctgtgctgggcggctggcgaccagcaagcgcgtggcttcctgatcggcggtacttccggtcgtaccaccctgaacggcgaaggtctgcagcacgaagatggtcacagccacattcagagcctgactatcccgaactgtatctcttacgacccggcttacgcttacgaagttgctgtcatcatgcatgacggtctggagcgtatgtacggtgaaaaacaagagaacgtttactactacatcactacgctgaacgaaaactaccacatgccggcaatgccggaaggtgctgaggaaggtatccgtaaaggtatctacaaactcgaaactattgaaggtagcaaaggtaaagttcagctgctcggctccggttctatcctgcgtcacgtccgtgaagcagctgagatcctggcgaaagattacggcgtaggttctgacgtttatagcgtgacctccttcaccgagctggcgcgtgatggtcaggattgtgaacgctggaacatgctgcacccgctggaaactccgcgcgttccgtatatcgctcaggtgatgaacgacgctccggcagtggcatctaccgactatatgaaactgttcgctgagcaggtccgtacttacgtaccggctgacgactaccgcgtactgggtactgatggcttcggtcgttccgacagccgtgagaacctgcgtcaccacttcgaagttgatgcttcttatgtcgtggttgcggcgctgggcgaactggctaaacgtggcgaaatcgataagaaagtggttgctgacgcaatcgccaaattcaacatcgatgcagataaagttaacccgcgtctggcgtaagaggtaaaagaataatggctatcgaaatcaaagtaccggacatcggggctgatgaagttgaaatcaccgagatcctggtcaaagtgggcgacaaagttgaagccgaacagagcctgatcaccgtagaaggcgacaaagcctctatggaagttccgtctccgcaggcgggtatcgttaaagagatcaaagtctctgttggcgataaaacccagaccggcgcactgattatgattttcgattccgccgacggtgcagcagacgctgcacctgctcaggcagaagagaagaaagaagcagctccggcagcagcaccagcggctgcggcggcaaaagacgttaacgttccggatatcggcagcgacgaagttgaagtgaccgaaatcctggtgaaagttggcgataaagttgaagctgaacagagcctgatcaccgtagaaggcgacaaggcttctatggaagttccggctccgtttgctggcaccgtgaaagagatcaaagtgaacgtgggtgacaaagtgtctaccggcagcctgattatggtcttcgaagtcgcgggtgaagcaggcgcggcagctccggccgctaaacaggaagcagctccggcagcggcccctgcaccagcggctggcgtgaaagaagttaacgttccggatatcggcggtgacgaagttgaagtgactgaagtgatggtgaaagtgggcgacaaagttgccgctgaacagagtctgatcaccgtagaaggcgacaaagcttctatggaagttccggcgccgtttgcaggcgtcgtgaaggaactgaaagtcaacgttggcgataaagtgaaaactggcagcctgattatgatcttcgaagttgaaggcgcagcgcctgcggcagctcctgcgaaacaggaagcggcagcgccggcaccggcagcaaaagctgaagccccggcagcagcaccagctgcgaaagcggaaggcaaatctgaatttgctgaaaacgacgcttatgttcacgcgactccgctgatccgccgtctggcacgcgagtttggtgttaaccttgcgaaagtgaagggcactggccgtaaaggtcgtatcctgcgcgaagacgttcaggcttacgtgaaagaagctatcaaacgtgcagaagcagctccggcagcgactggcggtggtatccctggcatgctgccgtggccgaaggtggacttcagcaagtttggtgaaatcgaagaagtggaactgggccgcatccagaaaatctctggtgcgaacctgagccgtaactgggtaatgatcccgcatgttactcacttcgacaaaaccgatatcaccgagttggaagcgttccgtaaacagcagaacgaagaagcggcgaaacgtaagctggatgtgaagatcaccccggttgtcttcatcatgaaagccgttgctgcagctcttgagcagatgcctcgcttcaatagtagcctgagcgaagacggtcagcgtctgaccctgaagaaatacatcaacatcggtgtggcggtggataccccgaacggtctggttgttccggtattcaaagacgtcaacaagaaaggcatcatcgagctgtctcgcgagctgatgactatttctaagaaagcgcgtgacggtaagctgactgcgggcgaaatgcagggcggttgcttcaccatctccagcatcggcggcctgggtactacccacttcgcgccgattgtgaacgcgccggaagtggctatcctcggcgtttccaagtccgcgatggagccggtgtggaatggtaaagagttcgtgccgcgtctgatgctgccgatttctctctccttcgaccaccgcgtgatcgacggtgctgatggtgcccgtttcattaccatcattaacaacacgctgtctgacattcgccgtctggtgatgtaagtaaaagagccggcccaacggccggcttttttctggtaatctcatgaatgtattgaggttattagcgaatagacaaatcggttgccgtttgttgtttaaaaattgttaacaattttgtaaaataccgacggatagaacgacccggtggtggttagggtattacttcacataccctatggatttctgggtgcagcaaggtagcaagcgccagaatccccaggagcttacataagtaagtgactggggtgagggcgtgaagctaacgccgctgcggcctgaaagacgacgggtatgaccgccggagataaatatatagaggtcatgatgagtactgaaatcaaaactcaggtcgtggtacttggggcaggccccgcaggttactccgctgccttccgttgcgctgatttaggtctggaaaccgtaatcgtagaacgttacaacacccttggcggtgtttgcctgaacgtcggctgtatcccttctaaagcactgctgcacgtagcaaaagttatcgaagaagccaaagcgctggctgaacacggtatcgtcttcggcgaaccgaaaaccgatatcgacaagattcgtacctggaaagagaaagtgatcaatcagctgaccggtggtctggctggtatggcgaaaggccgcaaagtcaaagtggtcaacggtctgggtaaattcaccggggctaacaccctggaagttgaaggtgagaacggcaaaaccgtgatcaacttcgacaacgcgatcattgcagcgggttctcgcccgatccaactgccgtttattccgcatgaagatccgcgtatctgggactccactgacgcgctggaactgaaagaagtaccagaacgcctgctggtaatgggtggcggtatcatcggtctggaaatgggcaccgtttaccacgcgctgggtagtcagattgacgtggttgaaatgttcgaccaggttatcccggcagctgacaaagacatcgttaaagtcttcaccaagcgtatcagcaagaaattcaacctgatgctggaaaccaaagttaccgccgttgaagcgaaagaagacggcatttatgtgacgatggaaggcaaaaaagcacccgctgaaccgcagcgttacgacgccgtgctggtagcgattggtcgtgtgccgaacggtaaaaacctcgacgcaggcaaagcaggcgtggaagttgacgaccgtggtttcatccgcgttgacaaacagctgcgtaccaacgtaccgcacatctttgctatcggcgatatcgtcggtcaaccgatgctggcacacaaaggtgttcacgaaggtcacgttgccgctgaagttatcgccggtaagaaacactacttcgatccgaaagttatcccgtccatcgcctataccgaaccagaagttgcatgggtgggtctgactgagaaagaagcgaaagagaaaggcatcagctatgaaaccgccaccttcccgtgggctgcttctggtcgtgctatcgcttccgactgcgcagacggtatgaccaagctgattttcgacaaagaatctcaccgtgtgatcggtggtgcgattgtcggtactaacggcggcgagctgctgggtgaaatcggcctggcaatcgaaatgggttgtgatgctgaagacatcgcactgaccatccacgcgcacccgactctgcacgagtctgtgggcctggcggcagaagtgttcgaaggtagcattaccgacctgccgaacccgaaagcgaagaagaagtaatttttcgtttgccggaacatccggcaattaaaaaagcggctaaccacgccgctttttttacgtctgcaatttacctttccagtcttcttgctccacgttcagagagacgttcgcatactgcactccgttgctcgttattcagcctgacagtatggttactgtcgtttagacgttgtgggcggctctcctgaactttctcccgaaaaacctgacgttgttcaggacttgcgctttgaacacgctggcgggcgttatcacgttgctgttgattcagtgggcgctgctgtactttttccttaaacacctggcgctgctctggacttgcggactgaatacgctcacgcgctgcgtctcttcgctgctggttctgcgggttagtctgcattttctcgcgaaccgcctggcgctgctcagggctggcggactgaatgcgctcacgcgctgcctctcttcgctgctggatcttcgggttagtctgcattctctcgcgaactgcctggcgctgctcagggctggcggactgataacgctgacgagcggcgtccttttgttgctgggtcagtggttggcgacggctgaagtcgtggaagtcgtcatagctcccatagtgttcagcttcattaaaccgctgtgccgctgcctgacgttgggtatctcgtgtaatgactggtgcggcgtgtgttcgttgctgaaactgatttgctgccgcctgacgctggctgtcgcgcgttggggcaggtaattgcgtggcgctcattccgccgttgacatcggtttgatgaaaccgctttgccatatcctgatcatgatagggcacaccattacggtagtttggattgtgccgccatgccatattcttatcagtaagatgctcaccggtgatacggttgaaattgttgacgtcgatattgatgttgtcgccgttgtgttgccagccattaccgtcacgatgaccgccatcgtggtgatgataatcatcattgtcatgatgatgatggtcatgatcgtcgtcgtcccagtcgatgctgctgaatagtgcgtacgtggtagcaacgcccatgctatagccgaatccgcgtacaaagctgtcaacaaacggttctccggctggtggtggcagataaaccggcggatacgcagtattggcccagttcccgtaaaccacggttgggttgtagttgggaatatagaccacatcaggattggcgggctcaatggaaatgacggttgttgccggctctgtaatgacggggttggcagttaaaactgtattggatggtatgacgggtgccgtgactgtctgttttaccggtacagctttcttcgttgtggtaataactttctgttcggtactactcttcaggctgccggtttgttgcgccagttgccgcaatcgctgtacgctgtccatcacgtcctgcggctgggccagaaaagcatcgcccaggttttgcacccattgcgggttttcgcccatcaatgccatcaattgtggaaaggccaccagacttttaacgctggcgtcccacggctggtcagataccgcctgaatagcagcatcgccttgtttaagtggattatcgtggctccattgcactgcttgagcaacgtttgtcggataggtacttgccatcagcacctggctaagtagggcgtcgggatacagcgcgacgggcgcgacccattgatctatttgtgcagtgctgaatgcggatttgacgacggcgggtgttacgggaggtgcggaaaccgttgcaggaaacgtaaccgcggcagcgtcagacacagccagttgtgtgctttgcggttccacaggcgcttccactgtgcggctttttatatatagcccggtagaggcggcacaaagcccggcactgcaaattagcgccagcacatggggtttaaacggcaaagtcattttcataattcggatctcaaggaaatcgcaatggtcggcgaactgccacccgcaggtgctgtgaatccgagtataaagaggcggtagtttaaattttgactaatcttgggattcgttgagaaaggtgattatcaccatgcgaattaacgaagtttttacggagggaaacaatctctagaccatccttaacgattcagccacttttttatgttgcttttttgtaaacagattaacacctcgtcaaaatcctgctattctgcccgttgcggtactgggcatttaccctacaaactgctgtctcacaggagcgtgaagagaatcgcctgccgcactatgacaatgagagcgaggagaaccgtcgtgctagaagaataccgtaagcacgtagctgagcgtgccgctgaggggattgcgcccaaacccctggatgcaaaccaaatggccgcacttgtagagctgctgaaaaacccgcccgcgggcgaagaagaattcctgttagatctgttaaccaaccgtgttcccccaggcgtcgatgaagccgcctatgtcaaagcaggcttcctggctgctatcgcgaaaggcgaagccaaatcccctctgctgactccggaaaaagccatcgaactgctgggcaccatgcagggtggttacaacattcatccgctgatcgacgcgctggatgatgccaaactggcacctattgctgccaaagcactttctcacacgctgctgatgttcgataacttctatgacgtagaagagaaagcgaaagcaggcaacgaatatgcgaagcaggttatgcagtcctgggcggatgccgaatggttcctgaatcgcccggcgctggctgaaaaactgaccgttactgtcttcaaagtcactggcgaaactaacaccgatgacctttctccggcaccggatgcgtggagtcgcccggatatcccactgcacgcgctggcgatgctgaaaaacgcccgtgaaggtattgagccagaccagcctggtgttgttggtccgatcaagcaaatcgaagctctgcaacagaaaggtttcccgctggcgtacgtcggtgacgttgtgggtacgggttctagccgtaaatccgccactaactccgttctgtggtttatgggcgatgatattccacatgtgccgaacaaacgcggcggtggtttgtgcctcggcggtaaaattgcacccatcttctttaacacgatggaagacgcgggtgcactgccaatcgaagtcgacgtctctaacctgaacatgggcgacgtgattgacgtttacccgtacaaaggtgaagtgcgtaaccacgaaaccggcgaactgctggcgaccttcgaactgaaaaccgacgtgctgattgatgaagtgcgtgctggtggccgtattccgctgattatcgggcgtggcctgaccaccaaagcgcgtgaagcacttggtctgccgcacagtgatgtgttccgtcaggcgaaagatgtcgctgagagcgatcgcggcttcagcctggcgcaaaaaatggtaggccgtgcctgtggcgtgaaaggcattcgtccgggcgcgtactgtgaaccgaaaatgacttctgtaggttcccaggacaccaccggcccgatgacccgtgatgaactgaaagacctggcgtgcctgggcttcagcgctgacctggtgatgcagtctttctgccacaccgcggcgtatccgaagccagttgacgtgaacacgcaccacacgctgccggacttcattatgaaccgtggcggtgtgagcctgcgtccgggtgacggcgtcattcactcctggctgaaccgtatgctgctgccggataccgtcggtaccggtggtgactcccatacccgtttcccgatcggtatctctttcccggcgggttctggtctggtggcgtttgctgccgcaactggcgtaatgccgcttgatatgccggaatccgttctggtgcgcttcaaaggcaaaatgcagccgggcatcaccctgcgcgatctggtacacgctattccgctgtatgcgatcaaacaaggtctgctgaccgttgagaagaaaggcaagaaaaacatcttctctggccgcatcctggaaattgaaggtctgccggatctgaaagttgagcaggcctttgagctaaccgatgcgtccgccgagcgttctgccgctggttgtaccatcaagctgaacaaagaaccgatcatcgaatacctgaactctaacatcgtcctgctgaagtggatgatcgcggaaggttacggcgatcgtcgtaccctggaacgtcgtattcagggcatggaaaaatggctggcgaatcctgagctgctggaagccgatgcagatgcggaatacgcggcagtgatcgacatcgatctggcggatattaaagagccaatcctgtgtgctccgaacgacccggatgacgcgcgtccgctgtctgcggtacagggtgagaagatcgacgaagtgtttatcggttcctgcatgaccaacatcggtcacttccgtgctgcgggtaaactgctggatgcgcataaaggtcagttgccgacccgcctgtgggtggcaccgccaacccgtatggacgccgcacagttgaccgaagaaggctactacagcgtcttcggtaagagtggtgcgcgtatcgagatccctggctgttccctgtgtatgggtaaccaggcgcgtgtggcggacggtgcaacggtggtttccacctctacccgtaacttcccgaaccgtctgggtactggcgcgaatgtcttcctggcttctgcggaactggcggctgttgcggcgctgattggcaaactgccgacgccggaagagtaccagacctacgtggcgcaggtagataaaacagccgttgatacttaccgttatctgaacttcaaccagctttctcagtacaccgagaaagccgatggggtgattttccagactgcggtttaaaaagtcagcgcacgcgctgcgcataaacgacacaatgcccggtgaatgagattcccgggcatttttttatttctaaaccatcgccgttccgctgtttttctccggtaaggctgcgataattacatcaatggcgcaatgcgatttcggtgcattgccgggagcagaggaacacactatggattacgaatttctgcgcgatattaccggagtggtaaaggtgcgtatgtccatggggcatgaagtggtcgggcactggtttaatgaagaggtgaaagaaaacctggccttgcttgatgaagtggaacaagcagcgcacgcactgaaaggtagcgaacggtcctggcaacgggcagggcatgaatacaccctgtggatggacggtgaagaggtgatggttcgcgccaatcaactggaattcgctggcgatgaaatggaagaggggatgaactactacgacgaagaaagcctgagcctatgcggcgttgaggattttctgcaggtcgtggcggcttaccgcaatttcgtgcagcagaagtaaataaatctggcggagcctgggagctccgccagagccgttaaacagctggcatattgcgcccgtaataaatctcgcgcatttctttccacagcgcagcggtaatttcctggcgctcgctgtcggttaagtcttccggtttggtgtggaacatgtagtgcttaaggtcgaactctttaagcaacatcttggtatggaagatattttcctgatagacgttcacatccaccatgtcatacagcgccttcatatcgtcagacataaagttctgaatgctattaatctcatggtcgataaagtgcttcataccgttaatgtcgcgggtaaaaccgcgcacgcgataatcaatggttacgatatcggactcaagctggtggatcaggtaattcagcgccttcagcggagaaatcacgccgcaggtagagacttcaatatcggcgcggaaggtacataaaccgccttcaggatgactttccgggtaggtatgtacgcaaatatgacttttatcaagatgggcaacgaccgtttctggcagtgggccggggtgttctgttttgtcgatgagtttcgggtcaaccggttcttcactcaccagaatagtgacgctggcaccctgtggttcgtaatcctggcgggcgatgttaagaatattagccccgataatggaacaggtttcactcaggatttcggtcagacggttggcattatagagttcatcgatataagcaatataaccgtcgcgctcttcggcagttttggcgtagcagatatcgtaaatacaaaaactcagacttttggtcagattattaaagccatgcagtttcagttttttcaatttcttatcttctccttaggacggctgactagccagtgcgtcttgcagatactgaggtaaggcaaaagctgccgtatggattgccggattgtaataacggcatttcaggccagaggcgagaaaacgcgcctgaataatttcggtactgagatggcgtaaggcgtcgttatctgtcgcccatgcaaaagtcatgataccgccgtaataggtcgggatcgccgcctgataaaagccaacgtcgctgaagtaatggctgagtttgcgatggctgtcgatggcttcttcctgctgtaaaaagcagacgccgttttgtgcgacgaagataccgccaggattcaggcaacgtttgcagccttcataaaatgcgctagtgaaaaggctttcgccgggaccgataggatcggtgcagtcggagataatgacatcaaaggtctggctggtttgattaacgaaattgacgccatcgtcgatcaccagcttaaagcgcggatcgtcgtagctaccggcgttatggttgggtagatactgacggcagaagcttacgacacccgcatcgatttccaccatcgtgatactctcaacgtttttatgtcgggttacttcacgcagcatggcaccgtcgccgccgccgataatcagcacatgtttcgcgtgaccatgggccagtagcggaacatgggtcatcatctcatgatagataaactcgtcgcgctcggtggtttgtactacgccatccagcgccattacgcgaccaaatgcagcgttctcaaaaatgatcagatcctggtgatcggtcttttcatgatacagaacgttatctaccgcaaagtactgcccaaactggtcgtgtagcgtttcatgccactgttttttttcggccatgggttgatacctcctttgttaacacccgtaaaaaaagggcgcaacataatagctaacattgaccgcggatgcacggtcaatatttctacaaaaaggtatcagggattatttgacgtaggcaagcaggcttaaggaatcgcgggccagggctttgcattttttagcgacgggaatgccaatgccgctgagatcgcggtagctgtcttcaccgagggctttcatgtcgaaggtgtcgtaattactgaggtcccactggttttgctgagcgaaaaagaccagtgcgcgacgaatttgcccgttaggtaagttctggtaaccacaatcgttcttcagaaagacaaaaactgccgttaaatcggccatatcttcggcttcagactcgctgagcgcgtaactgtttgcgcagacggccatcaggctgccgaataacactgttctgaaaaacgtcttcattgcttctaccaggggcttaaagaagataaacgttagcacactgcgagcgaggcgacgaccattattgtcgattaaattgtgtctgcggcttgaccttcccgtaaggggaaggactatgctcaacgtttgattttgtttcgcctgcttaagaataaggaaataactatgcaacgtcgtgatttcttaaaatattccgtcgcgctgggtgtggctagcgctttgccgctgtggagccgcgcagtatttgcggcagaacgcccaacgttaccgatccctgatttgctcacgaccgatgcccgtaatcgcattcagttaactattggcgcaggccagtccacctttggcgggaaaactgcaactacctggggctataacggcaatctgctggggccggcggtgaaattacagcgcggcaaagcggtaacggttgatatctacaaccaactgacggaagagacaacgttgcactggcacgggctggaagtaccgggtgaagtcgacggcggcccgcagggaattattccgccaggtggcaagcgcagcgtgacgttgaccgttgatcaacctgccgctacctgctggttccatccgcatcagcacggcaaaaccgggcgacaggtggcgatggggctggctgggctggtggtgattgaagatgacgagatcctgaaattaatgctgccaaaacagtggggtatcgatgatgttccggtgatcgttcaggataagaaatttagcgccgacgggcagattgattatcaactggatgtgatgaccgccgccgtgggctggtttggcgatacgttgctgaccaacggtgcaatctacccgcaacacgctgccccgcgtggttggctgcgcctgcgtttgctcaatggctgtaatgcccgtagcctcaatttcgccaccagcgacaatcgcccgctgtatgtgattgccagcgacggtggtctgctacctgaaccagtgaaggtgagcgaactgccggtgctgatgggcgagcgttttgaagtgctggtggaggttaacgataacaaaccctttgacctggtgacgctgccggtcagccagatggggatggcgattgcgccgtttgataagcctcatccggtaatgcggattcagccgattgctattagtgcctccggtgctttgccagacacattaagtagcctgcctgcgttacctagcctggaagggctgacggtacgcaagctgcaactctctatggacccgatgctcgatatgatggggatgcagatgctaatggagaaatatggcgatcaggcgatggccgggatggatcacagccagatgatgggccatatggggcacggcaatatgaatcatatgaaccacggcgggaagttcgatttccaccatgccaacaaaatcaacggtcaggcgtttgatatgaacaagccgatgtttgcggcggcgaaagggcaatacgaacgttgggttatctctggcgtgggcgacatgatgctgcatccgttccatatccacggcacgcagttccgtatcttgagtgaaaatggcaaaccgccagcggctcatcgcgcgggctggaaagataccgttaaggtagaaggtaatgtcagcgaagtgctggtgaagtttaatcacgatgcaccgaaagaacatgcttatatggcgcactgccatctgctggagcatgaagatacggggatgatgttagggtttacggtataaaaagaccgtattcggaaatatgcccggatctctccgggcattaaactgatgacaaacgcaaatctgcctgatgcgctacgcttatcaggcctacgctagctgtgcaatccattgattttgcacaattttgtaggctggataaggcgttcacgccgcatccggcatgaacaacgcgcacgttgtcagcaatctgagcaagtcttacttcacatcatccggcagcgcataagccacaatatagtcgcccatcttcgtaccaaaactaccgtgaccgcctgcggagatcaccacatactgcttaccattcacttcataggtcattggcgtagcctgaccacccgctggtaaacgaccctgccacagtttttcaccgttgctcatgttgtaagcgcgcaggtagttatctgccgtagcggcgataaacagcacgttacccgccgtggagattggcccgcccagcatcggcatacccatattgaacggcaccggaaccggcatcgggaacggcatactgtcctgcggcgtaccaatacgtttcttccacaccacttcattagttttcagatccagcgcgctgatataaccccatgctggctgtttacatggcagaccaaatggactgaggaacgggttgagcgtgacaccatacggtacaccgtactgtggctgaatgccggattccgtacccgtgcctttggcatctttcggctgctccatcgggttgccaggaccacgcgggatcagtttgctaacaaacggcagtgccattgggttggcaatcgccacttcacgatttggatcaacggaaatcccgccccattcgaacatccccaggttacccgggaagaccagcgtaccctgttcagatggcggggtgaaaatgccttcatagcgcatctggtggaacatcacgcggcacaccagttggtcaaacatggtggctccccacatatccgcaccgctcaaatctttcgtcggacggaagctcagttcagaaaacggttgagttggggttacgtaatcgcctttcgctgcaccttggggaaccggtttttccggtgccggaaccaccagttcgccattacgacgatcgagcacaaaaatgttgccggttttcgccggagcgtaaataactggcactttctgaccattaacggtgatgtccgccagcgtcggctgtgccggaagatccatgtcccacaggtcgtggtgaacggtctggtagctccacgccagtttcccggtagtggcattcagcgccagaatgctgctggcataacgttcctgttccggtgtgcggttaccgccccagatatccggcgtggtcacgcccatcggcagatagaccagatccagcttcgcgtcataggccgctggtgcccaggagtttgggctgttaaaggtaaaggtgtgttcgtcagacgggattgcgttcggatctttcgcgccgggatcaaaagcccacagcagctccccggtgttgacatcaaaaccacggatcacgccagacgtttcgcgggtactgaagttatcggtaacactaccggccatcacgatggttttatcggtgataatcggtgggctagtcggttcatacagacccggtttggtgtctggcatattgctttgcagattgagcacgcctttattggcgaaggtttcgcacagtttgccgttttcagcgttaatcgcaatcagtcgaccatcattgaccggaagaatgatacgacgcgggcaatccgccatcacttccgggctagcggtttctgctttggcttcatgataagagacaccacggcaggttacgtgctggaaagactcgttggttttcagctcaggatcgtaatgccatttctctttgccgctggcggcatcaagcgcaaacaggcgctggtgagcggtacacaggtaaagggtgtcgcccactttaatcggcgtcacttcattggtgatttcacccggatcgttcggctgcttcacatcgccagtacggaacacccaggcttctttcagattatggacgttatcggcgttaatttgtttcagcgggctaaagcgttgaccttcctgattacgaccataggcaggccagtcctgatcggctacgggggagatagcttcagcaggtgtggcatcggcgcttaaggtgccgttgatctcctgcggatcgttaaatccggcccaggtcaggataccaccgctaatcagcagtgcgaccaccagtgcggcaactgcgccgctggcaggaatgaccaggcgacgccagacaaacggcaggatcagccagatgccgaagaagaccagaatgtcgctgcgcggagtcagcgcccagaagtcgaaaccaacttcccagacgccccaaatcatggtgccgagcagcagggctgcgtatagccaaagcgcggcgcgtttactgcgccacagcatccaggcgacgccgagcatcacaaggccagcgatagggtagtaccaggagccgccaatcgcgaccagccagcctccgccaatgagtagatacagcccgcaaagcgctgcaaaaagggctgttagcgtgacgagtaatcgtcggctgcctgtattgttaattgccataaagagacaccatttcaattcattaatattttagtagcaattaattataggttttaacatgtgtgatcgtcatcacaattcgagctttattaacagattccgcgaatgaatagttttactggtatactgcgtgtcttgcgctttgttgcggtgccaaaacctgcccgtgcgaagtgatttgtttttaaatcatatggttagagatatgaaacatactgtagaagtaatgatccccgaagcggagattaaagcgcgtatcgccgaactgggtcgtcagattactgagcgttacaaagacagcggcagcgatatggtgctggtgggtctgctgcgtggcagttttatgtttatggcggacctgtgccgtgaagttcaggtatctcatgaagtcgactttatgaccgcctccagctacggtagcggcatgtccaccacccgtgatgtgaaaatcctcaaagatctggatgaagatatccgtggcaaggacgtgctgattgttgaagatatcatcgacagcgggaatacactgagcaaagtgcgtgagatcttaagcctgcgcgaaccgaagagcctggcgatttgtacgctgctggataaaccgtcccgtcgtgaagtgaacgtcccggtagaatttatcggtttcagcatcccggatgagtttgtggtgggttacggcattgattacgcacagcgttaccgtcatctgccgtatatcggcaaagtgattctgctggacgagtaagtgtgaagttgccggatgtgttgcatccggcatggcatttttatttgtggttggcgtgtttcagcttgaggttggaaatcccgtgacggtaacgttgctcaagggtttcgcggttggtggcggtaacatccagatcacgcagcaagccgtcgtgaatgccgtaggcccagccgtgaatggtaactttctgcccgcgtttccacgcactttgcataatggtggagtggcccaggttatacacctgttccatgacgttcagttcacacaaggtatccagacggcgctcttgcggcatttcgccgagcaaactgctatgtttgaaccagatatcgcggatatgcagcagccagttgttgataagccccagttccgggttttcaactgcggcttgtacgccgccgcaaccgtagtggccacagataataatgtgttcaacttcgagtacatccactgcatactgaaccacggaaaggcagttcaggtcagtgtgaatgaccaggttagcaacattacggtgaacaaagagttcgcccggttcaagaccggttaaacgttctgcaggaacgcgactgtcggaacatccaatccatagaaagcgcggtttttgcgcttgtgccagtttctcaaaaaacccgggatcctcttccaccagcattttactccatagtgcattgttgctgatgagtgtatctatgtctttcatggaggttaacgacctgtaaccaaataattacgtttggctaatatagggcaactccgggacgatttaaaccacagataaagtgtaagaacgtaaggtaagtaaaaatttatgaccattgcactggaacttcaacagcttaaaaaaacctatccaggcggcgttcaggcgcttcgtgggatagatttgcaggtcgaagcgggtgatttttatgcgcttctcgggccgaacggggccgggaaaagcaccactatcggtattatcagctctctggtaaataaaacctccgggcgggtcagcgtatttggttacgatctcgagaaggatgtcgtgaacgctaaacgtcagttgggactggtgccgcaggaatttaacttcaacccgtttgaaaccgtgcagcaaattgtggtgaatcaggcagggtactacggcgtggagcgcaaagaagcgtacatccgcagcgaaaagtatcttaaacaactcgatctatggggaaaacgcaacgaacgtgcgcgtatgttatctggcgggatgaagcgccgtttaatgattgcccgtgcgttaatgcatgaacctaaactactgattctcgacgaaccgaccgcaggcgtggatattgaacttcgccgcagtatgtggggctttttgaaggatttaaacgacaaaggcaccaccatcattctcaccacacactacctggaagaagcagaaatgctgtgccgcaatatcggcattattcaacacggtgagctggtggaaaataccagcatgaaggcgctgctggcgaagctgaaaagcgaaacctttattctcgatctcgcaccgaaaagcccgttaccgaagctcgatggctatcagtatcgactggtcgataccgcgacgctggaagttgaagtgctgcgtgagcaggggatcaacagcgtatttacgcagttaagtgagcagggcattcaggtattaagtatgcgtaacaaagctaaccgtctggaagagctgtttgttagtctggttaatgaaaaacaaggagatcgcgcatgatgcatctttactgggtggcgctaaaaagcatctgggcgaaagagatccatcgctttatgcgtatctgggtgcagacgctggtgccgccagtcatcaccatgaccctttactttattatcttcggtaacctgattggtagccgtattggcgatatgcatggcttcagctatatgcagttcatcgtaccggggctgatcatgatgagcgtgatcaccaatgcctacgccaacgttgcgagtagtttttttggtgccaagttccagcgtaatattgaagagctgctggtagcgccggttccgactcacgtcattattgccggatatgtcggcggtggcgtggcgcgtggtctgtttgttggcattctggtgacggcaattagtctgttttttgtgccatttcaggtgcatagctgggtattcgttgccttaacgctggtgctcacggcggtgttgttctcccttgcgggtttgctgaacggtgtgtttgccaaaacgttcgatgacatcagcctggtgccaacctttgtgttaacgccactcacgtatttgggcggggtcttttacagtctgactttgttgccgccgttctggcaagggctgagccacctgaacccaatcgtttatatgatcagtggtttccgctacggcttcctcggtatcaatgatgttccgctggtcactacctttggcgtactggtggtctttattgtggcgttttatttgatctgttggagcctgatccaacgtggacgtggtttgcgtagctaaggctatttcctctcctctggatttgggggagaggagttttgacggctatcaccctttatcaacaatggtcagggtagactgattttcggctaaggaggaaggcgatgttaggttgggtaattacctgtcacgatgaccgggcgcaagagatactggatgcgctggagaaaaaacatggggcacttcttcagtgccgggccgtgaatttctggcgcggattaagctctaatatgctcagccgcatgatgtgcgatgctctgcatgaagcggactctggtgagggtgtcatcttcttaaccgatatagccggagcgccaccgtatcgcgtggctagtttattaagccacaaacactcccgttgcgaagtgatttctggtgtcacgttaccgttaattgaacagatgatggcttgccgtgaaaccatgaccagtagtgagtttcgcgagcgtattgtcgaactgggtgcgccggaggtgagtagtctttggcaccaacaacaaaaaaatccgcctttcgtcctcaaacataatttgtatgagtattaacccgcgattctgatggcgcttttgctacaataaaagcgttgtttcaccctcggttattttttcatgtacaaacaagctgttattctcctgctgatgctgtttaccgcaagtgtcagtgccgcgttacctgcccgttatatgcaaaccatcgaaaatgctgcggtctgggcgcaaattggtgacaagatggtgaccgtggggaatattcgggccggacaaatcattgccgtggagcccactgccgcaagttattacgcatttaattttggctttggcaaaggttttatcgataaaggtcatctcgagccggttcaggggcgacaaaaagttgaagacggtttgggcgacctcaacaagccgctgagtaatcagaacttagttacctggaaagatacgccggtctataacgcgccgagtgcgggaagtgcgccatttggggtactggcggacaatttgcgctacccgattttgcataaactgaaagacaggttaaatcaaacctggtatcagatccgtattggcgatcgactggcctatatcagcgcactggatgcccaacccgataatggcctgagcgtgctaacctatcaccatattctgcgcgacgaagaaaacacccgttttcgccatactagcacgaccacaagcgtacgcgctttcaataaccagatggcctggctgcgtgacaggggatacgcgacactgagcatggtgcagctggaaggctacgtgaagaataagatcaatctccctgcgcgagcggtggtgattacctttgatgatggcctcaagagcgtgagccgctatgcgtatcctgtgttgaaacaatatggcatgaaggcgacggcgtttattgttaccagtcgcatcaaacgtcacccgcagaagtggaacccaaaaagcctgcaatttatgagcgtttctgagcttaacgaaattcgcgatgtatttgatttccagagtcatacccattttttgcatcgggtagatggttatcgccgacccatattactgagccgtagtgagcacaatattctgtttgattttgcacgtagtcgccgcgctctggcgcaatttaatccgcatgtctggtatcttagctatccgtttggcggatttaatgacaacgccgtgaaggcagcaaacgatgccggatttcacctggcggtgacaaccatgaaaggcaaagtaaaaccgggggataatccgttgttactaaaacgactttatatcttaagaacggatagcctggagacgatgagccggctggtgagtaaccagccgcagggataacaatcaagcaacctgtaccggaatcgctttcgcggtacgtttcatttcattgtcgccttcaaaataggcgacgttgggtcgccaggtgcgagcttcttcatctggcatggtaacgaagctggcgatgatgacaatatcgccgacactggcgcagtgggccgccgcaccgttaacagaaataattctgctaccgcgttctgccgcgatggcataagtggagaaacgcttgccgttggtgacattccagatatcaatggcttcgttttcgagaataccggctgcgtcaagaaaatcctggtcaatggcgcaagaaccttcatagtgcaggtccgcatgagtcactttcacgcggtggagtttgccctgcagcatcgtgcgaatcataacttctacctttctaccctgtcgttaacgaagcaggcgatgcctgctttgaggaaattctcacgcagtattgcccgatttttgtttagtgtctactcatctgacggcatttgcgtcagcagtttgcgtaccgcgccgaagcgtgccatgtatcgcctgtaacgaattgatatttctctgaacgctgctcggtaaacaataaagaggtggctgacgatagcgcgccttgactggatactgccttcacgcaaagccacacggaagacagggaagatggatgcaccgagtaccacaccgcatgacgcggtatttaaacaatttttaatgcatgcggagacggctcgcgactttctggagatacatttgccagtggaattacgcgaactttgtgacctcaacacgcttcatttagagagcgggagtttcattgaagagagcctgaaaggacacagcacggacgtgctctattccgtgcaaatgcagggcaatcccggttatctgcatgttgtgattgaacaccaaagcaagccggataagaaaatggcctttcgcatgatgcgttattctatagccgccatgcaccggcatctggaggctgaccacgataagctgccgctggtggtgccgatactgttttatcagggcgaggccacaccttatccgctaagtatgtgctggtttgatatgttttacagcccggagctggcgcgacgcgtctataacagtcctttcccgctggtggatatcaccatcacaccggatgacgaaatcatgcaacatcggcggattgcgattctcgaactactgcaaaaacatattcgccagcgcgacttaatgttattgcttgagcaactggtcacgctgatcgacgaagggtacactagcggaagtcagttagttgccatgcaaaactatatgctgcaacgcggtcatactgaacaagcggatttgttttacggtgtgttgagagacagggaaacgggaggggagtctatgatgacgctggcgcagtggtttgaagagaaagggattgagaaggggattcagcagggaagacaggaagtaagtcaggaattcgcccagcgtcttctgagtaaaggaatgtctcgggaagacgttgcagagatggcaaatttacctcttgctgagattgataaggtaattaaccttatttaagttacctgtgttatgacagatgacgtggggtaaattaataactggcgccatcagccgtagcgccagttaagtattacgccagctcgaccattttgttgtcgatcaggcgagcatcgccaagccaggcggctaccagaattactgcccgtttgctggtttcagaaacttccagcaatgtgtcggcatcgcgaatctgaatatcatcggcgcggaagcctttttcattcagttcttgccccgcaatggtaataatttcatcgagatcccgttccccagcctgcaatttgtcagcaatgctacttaaaactttgtacagaccaggcgcaattttgcgttgttccgccgtcagataaccgttacgggaacttagcgccagaccgtctttggcgcgcataattggcacaccgacaatctcaatatcgaagcccatatcggcaaccattttgcggatcagcgccagttgctgaaaatctttttcaccgaagcaggcgatgtccggctggaccaggttgaacagcttgctgacaatagtgctaacgccgcgaaaatgtcccggacggctggcaccttccagcatggtgctaaggccaggaacgtcaacgtaagtgtgggtttcagtaccgttcgggtagatctcttttacgctaggggcgaaaactaaatccactttacgtttgtttagcttctcgcagtcctcctgcaaggtccgtggataacgagccagatcttccgggcggtcgaactgcatcgggttaacgaaaatactgacgacgaccacatcggcgcgggctttggcttcgtcgaccagcttcatatggccatcgtgcaggttacccatggtaggcaccagcgccacgcgcttgccttccatacgcaggcggcgaatttgctgacgcagcagcggcagggtttcgataattaacacaacgtgactccttaatggaaactgtgttcttcgcccggataaacgccggactccacttcagccatatactgccgcacagccgcgcggatgtcgcccgtttcggcgaggaaatttttagcgaatttaggaatgtgaccgccggtaataccaaaggcgtcgtgcatcacgaggatctgcccgtcagtgacgttgcctgcgccaatgccaataaccgggatcgccagtgcttcggtaatacgttttgccagttcaaccggcacgcattccagcaccagcagctgtgccccagcagcttctaaggctaatgcatcgctgagcagttgatcgcccgcttcatcgccgcgcccctgaactttgtagccaccgaaaatattcacactctgtggtgttaaacctaagtgaccacatacaggaacggcacgttcggtcagcatttgtacggtttctaccagccactcaccgccttcaattttgaccatgttagcaccggcacgcataaccgttgcggcgttttcgaaggcttgttccggcgtggcatacgccataaacggcaggtcagccagcagcaggcagtttggtgcgccgcgacgtacggcggcagtgtggtaggcgatatcggcaacggtaactggcagggtggagtcgtgcccctgaaccgtcatgcccaggctatcgcccaccagcatgacgttaagcccttcatcagcaaagagtttggcgaagctatagtcataagcggtgatggtcgcgaaacgttttttttcctgtttgtacttctgcagtaaggagatggtggtcggtttcataacgtatcctgataaattgatgttgtgctgtctggcattttatcagtcacattggtgggggcaatgatttatccgtagcagcactgccagaaggtgacagtgctgctacgttatcagggataggttacctggaaagtactggtggctttaaattcgccgggttcgatagcaatattcccgtcttgctttaatgttgcctggaaatgaagaggctgacttgtgccgttaccttgattagggtaaaccccatcggaggtgtcatcttcggtttcataatctatataaacagaattcgtatcattaggttttaatgtcattagcggatttttactggttgctaaaccttcaatgagtacgccaacgcctttggcggcagtgcttccagtaagcgtattaccaagcagttgtgtgttttgagtacctacttttccagtgacgagttttgtttcaatattacgcacacgaatacaattctgaaggctgatatcaaagggaacaggactagcgccatttttaattgtcccagagctatattctcccattctaaccgtactaccattgacacttggcccggtaagtatggaggtaaaacatgttggtaaggttaatttgacattattcagtgtgaaattgacataaatgtggttgctgtgatctacaacttttgtaccaggactgtaggccttaaagctataaaggtaattactactactggataactggacttgctgattaagtgtaggatcgaaattagtatctgtataaaattcaacagttatgttgtgtactataccaccaatagcccaaaacttatcgtagtcgtctgctttgttgcaacccttagtttgtagatcgctgtctgtgacggaaaagaaaaattcttggttggaaggatctccgatatagattcctgggctttgaatgtcagttattgtatcgtatgcagaccagaccctacttattaacatggtgtaatacagaccaggaacagatgtattaaatagtttatgtccgccataatctttaccactatagaccatggcattttcaatagttattggaccaggattcgctctgccagatgtattgcagtaaagaataccaccaccggtacctgtatccaggtaactccagtacatttttaccccagtcgggccgagctgcgtgggtttataaaaaaccaagttgcttgctgtacttgtgtaattaaaggtcatctgtgcggcagtggaggggcctcgatagttatcaactcctgcattatttcccacaataaaacttgtatatgcactgactgtattacaacaagaatacagtgctaaaaaaagaatgtacctgaagatagtcttcatttttactccaatgtttctttattgttatggtttgcgctgtttttgtttgttattcgtagtaaatatccactaacacatggctcataagttgaccagatgtaacactcaatgcaggatcgattttttgcattcgggtgctaaatttccaggaactaccattcatgtcatcgctcattactggataaacggaacgagatccgccactagcattaagaacattgaatgtattcgcgctatcctgagtagaaaatataactactcctacattacttgctccactgctaatttcattagcaaatatttgcctagagccagcagccatgacaccgctaagggctctaaaatcaatatgtaactgatttagcacatcgccagttccctgtaatgcacagtcggatacagtgatagtgaactcttttccacctggttgataactttcaggagtaacattaccactaaaatatcccaccccaacgacgccaagatcaatattaccctggttactgattccgcttttgcaggtgctgttttttacattggcaacaaggtcaatatcctgtccagcaatggctggacaggcgatgcaaaacagtaaactcagaaacagaattattctcttcatcagcttacgttgagtgggatgcatatatagttcctgaatctgtaagtctgttagttataggttactgtaaatgtggctggtgcagaaaacttacccgcagtgacattgtttacggttttatttttttccacgaccaggcgtgcactcatcggataataaacgaccgcattggctgcagtggagattgttacctcttgacttgctggtgttacacagctaaattgtgttgcactccctgttgccggagttacagtgctccagacttcaacggcgacagcacttgctttatctgcggctgtggaaccatttgcaaaccccgcaccgtcattagcagttccctcgcatgtggctcgcttggttaattttatttgcgcttttttattggggatacccgcacagtctttgaatttgagtttgaatgtttttactttggtcttggcattgatttcagaaatatatacatcaccaaaatcaacaacagaaatgtcctgatcagagtcatttactaatgtagcggtacaagtacccatttctacagtagtaataacggtcagtccaatactgtctgttgccgcataagagagtacgctgaacaaactggcagccaaaacgacactgctggataatccataacgtaaatttttaaatgtcatcataattatccttcttattgatagatgaaattaaacgtcgccagtgcacgaaaattccccggtacgccttgccctgcatctgtttcacgtagcgcaacggtcatttcaagacccttatcgggctgcatctcgtctgtgctccagcgtatcttttccgcactgttaggtttaaggaaagtggcatcatcagtagtccgttttttgaaacccataccgatattacttgtcgtgctagaactatcaccagactgcggtataataagcttaggactgctactacttgcatttccggtcagagtggtatcaatccaactgatgccactgctgcacccactggcaaccagtttaaaatcagcctgagattctgtcgttttattcgcgatcttatccagacccatcttagggattctcaatgtgtagttattattgccatcattcgtgacgttattaccagtaagtgtgatgttacaggttgtcgctttgacagtggctgtaaactctacattaatatccgttgcaaatacactgggacttaataatattcccatcagtatcactattttatgtggcgttgtttttatcatttgacgtcccttgtagttactgaatctgacaccgaattccattcagaataatagattgtgctattttttctgcttctgggctttgttgataatgcgcaagacaacttacgggtttactttgttcgagccatttaatgctgatatttccctgctgctcaataccacgaacaaatgcttgtccaccctgtccaacattaccaatgacattgccttgctcatcataaatatctgcagcaaatggaatatttttaccatcacttcgtgtgatgttcataatggcactttgcccttgcacggtttcaaaatcagcaaagacgacactaccctgacgcggtacagctactgcactggtactttttaattcaacatcgttctcaagatcgttgatatccagcgcgatacggttttcatgataaggagaaagagcgctggtgacaccataaccccatcgatcgatagtactgttgccataatttattcgcgctccttgagcacctggagcctgaactaccgccagtgtatcggagtcgctaaaactatcattactgaaagtcagtccaccgctatgcaatacaaaaccaccgtcggtgctgagagaaacttgacggctgttatcgctatttgcagaaatactacctgccagcgttccccatggactctcatagctggcataacccccaacataactcaaatctttgctggctttattcatcgtatagccagtattcacgctataactgacgcgagcgttatcgctatagccactgctgctaacgttgagttggttattacccttaaagtcactgcttatttgagtatcaatactctggaaaccactagtacgttgttcagtgccaagtaatttttcaattggaatggtgaaactaagataaacgctatcgtcagtgtcgccgtcttcattccaactacgctgggcactgacactgtagctgccccaggatgtactgttactgtagccaatagagtaattgctacgattttgtccggaagcccagtaatcggaccaacttccggaaagataaaaactaccgtaatcttttttctcaaatttcaacggttggttaatactgaccgtaacctgatttttcatgcgactgtaattacgcatggatttcggttcaagatcttgttcgggatgtttcacttcatcaattagagttagtgcatcattaagaccaaggtaattctgtgtgctatagcgataggccgcgatattcagactagtacttgtttcttcgaataacttgttccaggaaacacgataactttgcccctggtatgttttatcatccgggatacgaacattggaatgagtcacatcgaaagaaaatgcaccaacactagtattcagaccaagacctaacaaaccagcggtatagttattatcggttatctgaataccggtataacccgtcagatagttattcaggccgtagtagtagcttgcttgaaataaattaggctcatcctgaatatcatcttttaagacctgaccgccgctaatatcccaacgtccaacgccagggcgtaacatttgaacaacggaactgaaaggttggctgaatgtccgcttactgccatcggattcttcgatggtaacaataagatcgctgccgtacccactcggactcagatcatcaatgacgaaagcgcctggcggcaccgtcgtttcataaatcttatagccaccttgcgtaatagtgactttggcgttggtattggcaacgccatgaatgataggcgcaaagctggctaaagtcggaggcaacatgcggctgtcactgtataaacgaatgcctcggatactgacggaatcaaaggtttcgcccgtcgtataagactcaccaagaatgagttgagaacgcaggctggcgatatcacgctgaacataccgattcttaaaatcataattactgccagaatcggtcatccagttgtagttgccgctggcacgcagtcgccatgcacctaaattcatcccaccgttaaatgcagcataaatgctttcattttttcgaccaggggtttcactatgatatccgttgaggttgtaactcaacatggccgcattaatgccgttttcccataagcttggatcaacatagttttggtaatttttcattacccaggcttgaggaacgtctatatccagacgttgatcgttaacgtcataacgaacagaagcctgagggataatttccgtcaaattgaggcaattgccgagcgtttcatccctggcaagcagaacggctttttcgttatttatatcgggagaattaatatgaaactgcaataaattctttaatgtgatacaagcctgggcgttcttttttccttcaattgcgacaaatgtaatactttggttaatgattggttggtcgtttacataaacactgacgtcgtaaacacccggtatagcggggttaccttcactgtaccggctgagatcaatattagatgcattctgccccatcaggaaggtatggtcatattcaacgagttcagcactgaaagcagtattgcaatacagcagcgcgcaaaacgtggcgatacgggtcagatgatgataatttttagtatattctatagtcacgctatgcttcctgcggaattatatccttgcctgattacagcctggcattaccttcaattgcgccaccaaagtcattaatggcgtaaaaatgcacttttgcagaattcgctttgccattaaggccattgactttcatgacctcatcactaaatggtgcaatcattttcacatcaatcggatagcgtttaccgctagcttctaaatcaccactgctaaaagagacgtagtaaggggttggattggtcactcgtaaactcgccttaccttcactaccactccagaaccacttcagggctaacggggcttcagagggatttcccttcaatccatccgggcgatagaaaagttttatacgtgtgcgaaatgccagttgcagcaggctttgattcgcgaccttttctgcatctggttttggtggaacttccagtacgttaaaccagaacacgctctctctgtctttaggcagactggtgctggctgtgtacattaatttgattgtttgcccacgtttggcatcaatacggcttactggcggcgtagcagtaaaagggactgtaatactgccaggctcagcgttgtcatcgccagtatctaaccaactctggacaagcaacgggttattccctttattttccagacgtacgttgacacttttttgatcgcttttatatattacgcgagtaccgctaatgacaatgtccgcaatagagctactactaaaagccatacaggttacgaagcataaagctgttgtatgtttggtgttaaaaaacataaaccatccctgatagagttaattaaaacagggaataatataaaatagaaattattattccctgtatattcattcaatcaatttaactggtgaatacttactgataagtaatggtgtatgcagtgttagtttttacataaccagcagttgctgtttggtctgcgacggcacgaacgtaagacgctttaaaatcataaacagcagattttgtcgttgcatccagggctttagtatacacatcgccagggttgttaatttgaacctgtttgatagtggaaccatcaatattgtgtagagcgatattaacgccgtcagatgggttgttaatagacatgtcgttgttcaaagtccctttgctgttaccaaagaaaacagaaccgaaggtcattttagccgtgctacctggattcggatttgctttgctgcagtcaacggtgatgctgaaaggtttagctttagcgccaacggtgtcattcagtacgccagcatcgatttcaccaacggttgcggtttgcagcaggatcagaccatccttgttaccgccgtcaacgcgggtttcacaggtgttatcaacaaccagaccactgatatttaactgaccgccgtccatatcagcagaagcagtacctgcaaccatcgccagcataagaccagacagggcaaaacctaattttttagacataaaaatcctttaataaaattccattagtcagactacatgtttgaagaatgactattcatgacacaaataggagaaacaaatgttagatattaatgagcaatgatatttgttacccaaatttacaaccattgttcattaggtcgcctattgtgcactttagaagcttttgaacaaattaaatttacttaattcaaaattaagtaaaaataagttcacaagtgcaattggttagggtatggagatgggattgatatttatttataggaagttatattatttccgcaaagagatgtttaaactaaaatcgtaattaaggaaagagatgagatatgattttcagaaaatatttatattcgcaatataaataaattaccatttgtttaatttgtcaaatgctcttgtatgtaagatttgacgcaacatctccccatcaggaaacaccaactccggcgcgatttcaaacagcggccacagcataaatccacgattcttcatatcgtagtgcggaacggtcaggcgttcagtatttatcacttcattaccaaacagcatgatgtcgagatccagcgtgcgtggtccccagcgttcagctttgcggacgcgaccttgctgcaattcaatacgctgtgtgtgattgagtagctcttcaggtgcaagagaggtttccagcgccacggctgcgtttaagtaatcgggttgatcttgcggccccagcggtggggtgcggtaaaagctagaaacggtaagaatgtggctttcagggatatcgcctaatgctttcagggcagcattgacctgctccagcggagaggccagattgctgcctatggcaatatacgccactgtcatgcggtaccctcacgacgtggtgcgcgtttgcgtggacgacgagtacgacgacgcggactcggttcttcatccagctcgttgagcatccctttttggtctggtggcgcggaaacctggaactcaccccaccatttcaccagacgctgcagttcagcgttacgctcaacttcagctcgcaaggccaacaggtcataagccgcacggaacttaggatgctccagcagtttccatgcgcgtttaccctgacgacgggacatacgcaactgcaactgccagatatcgcgggttaatgtcgtcagacgtttcgggattgccagactacggcaggcttcgtccagcacgtcgttcatcgccagcgcgaaagcgtcgtgataggtcaggccgctttcctgggcgatcttctgtgccgtctccagcagtgggtaccagaacatggcggcaaacaggaacgccgggttcacgcgcatatcgttatggatacgcgtatcggtattcttcagcacctgttcaatgatccgctccatcgggctgtcgccattttccgtgaagtagcgggtaatggtcgggaacagcggctggaacagatgatattcacacaacagcttataggtttcgtaaccgtagcccgcttgtagcagtttaaggctttcttcaaacaggcgtgccggtgggatatcgttcagcagggtagcgaggcgagggatcggttctgcggtttccgggctgatgcgcatacccaatttggcggcaaaacgtaccgcgcgcagcatacgtaccggatcttcacggtagcgcgtttccgggttaccaatcagacggataacgccgtccttcagatccttcatgccgccaacgtaatcacggacggtaaaatccgctacgctgtaatacaggctgttgatagtgaaatcgcggcgctgggcgtcttcttcgatggagccgaaaatgttgtcgcgcagcaacatgccgttttgcccgcgttgggaggtcgtgcggtcgctgacgttaccttcgtggtgtccacggaaggtcgcaacttcgataatctccgggccaaacattacatgagccagacggaaacggcgacccaccaggcggcagttacggaacagtttgcgcacctgctcaggcgtggcgttagtggttacgtcaaaatctttcggctttttgccaagtaacaggtcgcgcacgccgccgccaaccagccaggcttcgtatcccgctttattgagcctgtacattaccttcagggcattttcactgatatctttgcgggaaatagcatactgctcacgcgggatcaccgtcacctgtggacgggcgactgcctgttcagcctcgctttcctcgcggcttagcaccttgcggcaaaaattagcgactcgggtaaaaatagtacacctcggtagtgtcaaacatcattcaggacaaaaaaatagcggctaatcatagctcagcaactcgcattactgaatgtactatttacaattgcgctctcgggcacggcggtaagccgccagtttttgacggcactctgaaggatttgctcgacgctgaaatcctgccagtgtgcttctgcctgctgccccagaaattgaagtgccgcgattagtaccgggcgtggatcgcctttcggcaacgcaggcgcatgattctgcttggaaagtttagcgccttgtggattaagcgccagcggcagatgaatgtaatctggcactttccagccaaaaagctggtacaggctgatttgccttactgttggttcaatcagatcagccccacgcactatttctgtaacgccctggaaatgatcatcaaccacaacagccaggttgtaggcgaacaacccatcacggcgatgaatgataaaatcttcccgtgccagtttttcgtcggcgtgaataatgccgcgcagctggtcagtaaattgcgtgaccggatgctgctggcggatacgcactgcggcgttgtctggtccatgatgcaacacccggcaatgaccgtcgtaaataccgccaatgctttgaatacgcgcacgcgtacaggtgcagtaataacttagtccttgttcatgtaaccaggcgagtgcttcacgataggcgtcgtgacgttggctttgccagagaacatcgccgtcccagtgcagaccgtaatgttccagctggcgcaggatagtttctgcggcaccgggaacttcacgaggcgggtcgatatcttctatgcgtaccagccagcgaccttgccgggcgcgagcctgcaaatagctgccgagcgcggcgatcagagagccaaaatgaagctcgccggaaggagagggggcgaagcggccaatatactgtgtgtctgtcatctctttgaacaaaaaataaggcgggagcatttcccgcctgtggtaaacgtgatggaacggctgtaattagccagccatctgtttttcgcgaatttcagccagcgttttgcagtcgatgcacagatcggctgtcgggcgcgcttccagacggcgaataccaatttcaacaccgcaggattcgcagtagccgaaatcttcgtcttccacttttttcagcgtcttctcgatctttttgatcagcttacgctcgcgatcgcggttacgcagttcgaggctgaactcttcttcctgggctgcacggtctaccgggtccgggaagttggctgcttcatcctgcatatgtgtaacggtgcgatcgacttcatccctgagttgattacgccatgcttccagaatacgacggaagtgcgccagctgggcttcattcatatactcttcgcccggcttctcctgatatggttccaccccagcgatggcgagaatactcagggagcttgttttacggttttgcccttcttgcatgttgcttctccttaacacgcactatcgatccccatgttcgggggaaaaatgaggccgctataaatagcagatgcttttccggatagcaattatctaaacgtaacacttgacaactgtgtgaggaaaagcgtatttgcgcacgcgaccagaatgtaaattaaccagttacttactttattacaatgtaaccggcagactttttttaagagccatgccttcagcagaaatttccgctttgtaagccagaatttctacccccctctgttgagcttcactcaatagttgcgcgtatttctcatcgatgtggcgcgcgggactaaaccgtgtaatggcactatgcagcacggcgaaaaagataaccgcacgctggccttcagccgctacgctcatcaactcccgaaggtgtttctgacctcgttcagtgaccgcatcgggaaaatatccctgttcgttctccgctaacgtaacgcttttcacttcaatatagcagtctggacggctatccgcctgcaacataaagtcaatacggctgcgttctgcgccgtattttacttcgcttttcaggctgctatagccactcagttcactaatactttcattaaggatagcctctttcgtcaacctgttagcccaaagcgtgttgacgcaaataaatgcgccgctctggctttgagttaattcccaggtgtgtgggtatttccgtttggtgttgtcactagtgctataccagacggtatcgccaggcgttgcacaaccggtcatcgcacccgtattcgggcagtgtagcgttaattcgcgaccatcgggtgtgatcacatcggctaaaaaacgtttgtaacgctgaattagcgtcgcgcgctgtagagggggagaaaattccattgcgacaatccttgttattgcgttagcgcccagcgttttagcggcgtgtagcgtgtgcgtccacgggcaaagctggaggcgtaaagggtgaactccgtcaccgcatagctccagttaaaacctggcggcgggattgtcaccgcctcgctggcgtcgcgcaataaggtaatatgtggatgaaacggacgattgctttgaaaacaaccgctgcgggcagcctgactacggagcatattcgccagctggattaagccgcgtggcggctgacgcatccctaaccacaccacacggctacgcagccattgtccggcgtcatcaagcgtgagtgtgaaaccaggttgacgaatccgtccggctaaaagagaaagcgccttctctttctcggcgctcacttcgcctaaaaatgccagagtcagatgcaaattatcggcggcgaccggacgtcccgcctcaggtgggaagtgtgtggcgcgccaatggataatctgttcgcggatttctgcaggtaagtcgatagcaaagaacagacgttgcggttcagacatgtgaggcactcggttatgaattaccgcgatgctacaatgtggcgcgaagaatgttaaccctctggagcgttttgtgagcagcttgcccgttgctgccgtcttacctgaattacttaccgctctcgattgtgcgccgcaggtattattaagtgcgccgaccggggccgggaaaagtacctggctgccgctgcaactgctggcgcatcccggcattaacgggaaaattatcctgctggagccgcgtcgtctggcggcgcgtaacgtcgcgcaacggctggcggagctgcttaacgaaaagccaggcgataccgttggctaccggatgcgtgcgcaaaactgcgtcgggccgaatacccgcctggaagtggttaccgaaggcgtgctgacgcgcatgatccagcgtgacccggaactgagcggtgttggactggtgatccttgatgaatttcatgagcgcagcttgcaggcggatttggcgttggcgctgttactcgatgtgcaacaaggtctgcgtgatgaccttaaactgctgattatgagcgctaccctggacaacgaccgcttgcagcaaatgctgccagaagcgcctgtcgtcatcagtgaagggcgcagctttccggttgaacgccgttatttaccgctgcccgcgcatcagcgttttgacgatgccgttgcggtagccaccgctgaaatgctgcgtcaggaaagcggaagtttactgttatttttacctggcgtcggagaaattcagcgtgtgcaggaacaactggctagccgcatcggcagtgatgtattgctctgcccgctgtatggcgcgttgagcctgaacgatcagcgaaaagcgatcctcccggcaccgcaagggatgcgcaaagtggtgctggcgaccaatattgctgaaaccagtttaaccattgaaggtattcgtctggtggtggattgtgcccaggagcgtgtggcgcgttttgatccgcgcacggggcttacgcgactgattactcaacgcgttagccaggcatccatgacgcagcgtgccgggcgcgccgggcgtctggagccgggtatcagcctgcatttaatcgccaaagaacaagcagaacgcgccgcggcgcaaagtgaaccggagatcttacaaagcgatctttccggtttgctgatggaattactgcaatggggatgcagcgatccggcgcagatgagctggctggatcaaccgccagtagtgaatctactggccgcgaaacgtctgttacaaatgctgggggcactggagggtgaacggcttagtgcgcaagggcaaaaaatggcagcgctgggtaacgatccgcgtttagcggcaatgctggttagcgcgaagaacgacgacgaagctgctaccgcggcaaaaattgccgccattctcgaagagccgccacggatgggcaatagtgacctgggcgtggcgtttagccgcaatcaaccagcctggcagcaacgtagtcagcaactgttaaaacgcttaaacgtacgtggcggtgaggcagacagtagccttatcgcgccgctacttgccggggcgtttgccgatcgcattgctcgtcgccgtgggcaagatggacgctatcaactggcaaacggcatgggagcgatgctcgatgccaacgacgcgctaagccgccacgaatggttgatcgcaccgttattattgcagggcagcgccagcccggatgcgcggattttactggcgctgctggtcgatattgatgagttagtacaacgctgcccgcagctggtacagcagtctgacactgtggagtgggatgacgcgcaaggtacgctgaaagcctggcgtcggctacaaatcggtcagttgacggtgaaagtgcagccgctggcgaaaccgagtgaagacgagttgcatcaggcgatgcttaatggcatccgtgataaaggtttaagcgtgctcaactggacggcggaagcggaacagctacgcttgcgtttgttatgcgccgcaaagtggttgccggaatatgactggccagcggttgatgatgaaagtttattggcagcgctggaaacgtggctgctgccacatatgactggcgtacatagtctacgcggcctgaaaagtctcgacatttatcaggcactacgcggattacttgattggggaatgcagcaacgtctggatagtgaattgcctgcgcattacactgtgccgacgggaagccggatcgccattcgttatcatgaagataacccgcccgcgctggcggtgagaatgcaagagatgtttggcgaggccaccaatccgacgatcgcccaggggcgcgtgccgctggtgctggagttgcttagtcctgcccaaaggccattacaaatcacacgagatttgagcgacttctggaaaggagcgtaccgtgaggtgcaaaaagagatgaaagggcgttatcccaaacatgtctggccggacgacccggcaaatactgcaccgacgcgacggacgaaaaagtatagctaaggttggttttctccctctccctgtgggagagggccggggtgagggcatcagcgcgcacgttcaccctcaccctaaccctctccctcaagggagaggggaccgatcgagcacaaattttgagagatatcttcttctgtcttgtaacagaagaacagaaaatcgggcttttgcgcctgaatattgcggagaaaaagcatggccgggaatgaccgcgagccaattggacgcaaagggaaaccgacgcgtccggtcaaacaaaaggtaagccgtcgtcgttacgaagatgacgatgattacgacgattatgatgactatgaggatgaagaaccgatgccgcgcaaaggtaagggcaaaggcaaagggcgtaagcctcgtggcaaacgcggctggctatggctactgctaaaactggctatcgtttttgccgtgctgatcgccatttacggcgtttatctcgatcaaaaaattcgtagccgtattgatggcaaggtctggcaactgcctgcggcagtttatggccgaatggtcaatcttgagccagacatgaccatcagcaagaacgagatggtgaagctgctggaggcgacccagtatcgtcaggtgagcaaaatgacccgtcctggcgaatttaccgtgcaggccaacagcattgagatgattcgccgtccgtttgatttcccggacagtaaagaaggacaggtgcgcgcgcgtctgacctttgatggcgatcatctggcgacgatcgtcaatatggagaacaaccgtcagttcggtttcttccgtcttgatccgcgtctgatcaccatgatctctagcccaaacggtgagcagcgtctgtttgtgccgcgcagtggtttcccggatttgctggtggatactttgctggcgacagaagaccgtcatttttacgagcatgatggaatcagtctctacagtatcggacgtgcggtgctggcaaacctgaccgccggacgcacggtacagggtgcgagtacgctgacgcaacagctggtgaaaaacctgttcctctccagcgagcgttcttactggcgtaaagcgaacgaagcttacatggcgctgatcatggacgcgcgttacagcaaagaccgtattcttgagctgtatatgaacgaggtgtatctcggtcagagcggcgacaacgaaatccgcggcttcccgctggcaagcttgtattactttggtcgcccggtagaagagctaagcctcgaccagcaggcgctgttagtcggtatggtgaaaggggcgtccatctacaacccgtggcgtaacccaaaactggcgctggagcgacgtaatctggtgctgcgtctgctgcaacagcaacagattattgatcaagaactctatgacatgttgagtgcccgtccgctgggggttcagccgcgcggtggggtgatctctcctcagccagcctttatgcaactggtgcgtcaggagctgcaggcaaaactgggcgataaggtaaaagatctctccggcgtgaagatcttcactacctttgacagcgtggcccaggacgcggcagaaaaagccgccgtggaaggcattccggcactgaagaaacagcgtaagttgagcgatcttgaaactgcgattgtggtcgtcgaccgctttagtggtgaagttcgtgcgatggtcggaggttctgagccgcagtttgcgggctacaaccgtgcgatgcaggcgcgtcgtagcattggttcccttgcaaaaccagcgacttatctgacggccttaagccagccgaaaatctatcgtctgaatacgtggattgcggatgcgccaattgcgctgcgtcagccgaatggccaggtctggagtccgcagaatgatgaccgtcgttatagcgaaagcggcagagtgatgctggtggatgcgttgacccgtagcatgaacgtgccgacggtaaatctggggatggcgctggggctgcctgcggttacggagacctggattaaactgggcgtaccgaaagatcagttgcatccggttccggcaatgctgctgggggcgttgaacttaacgccaatcgaagtggcgcaggcattccagaccatcgccagcggtggtaaccgtgcaccgctttctgcgctgcgtagcgtaatcgcggaagatggcaaagtgctgtatcagagcttcccgcaggcggaacgcgctgttccggcgcaggcggcgtatctgacactatggaccatgcagcaggtggtacaacgcggtacgggtcgtcagcttggggcgaaatacccgaacctgcatctggcagggaaaacagggactaccaacaataacgtagatacctggtttgcgggcattgacggcagcacggtgaccatcacctgggtcggccgtgataacaaccagccgaccaaactgtatggtgccagcggggcaatgagcatttatcagcgttatctggctaaccagacgccaacgccgctgaatcttgttccgccagaagatattgcagatatgggcgtggactacgacggcaactttgtttgcagcggtggcatgcgtatcttgccggtctggaccagcgatccgcaaagcctgtgccagcagagcgagatgcagcagcagccgagtggcaatccgtttgatcagtcttctcagccgcagcaacagccgcaacagcaacctgctcagcaagagcagaaagacagcgacggtgtagccggttggatcaaggatatgtttggtagtaattaacatctaagcgtgaaataccggatggcgagttgccatccggtaaaataacatcccatctaagatattaaccctttcttttcatctggttgtttattaacccttcaggaacgctcagattgcgtaccgcttgcctgtaagactcaatgtaagccgtgccaaaatatgatggctaggacgagctagaacccgccagcgtttcgaatattatcttatctttataataatcattctcgtttacgttatcattcactttacatcagagatataccattccatataacggccctgtacgcctggacggataaagcgtttacgcgacaacggatgcccgatgcgacgctggcgcgtcttatcgggcctacaaacggccccgaatcgtaggtcggataaggcgttcacgccgcatccgacaaaccatgctggatcacaacttcgcaaacacccgacgtgcagcatcgatggtgttattgatatcttccatgctgtgcgccacggacataaagcccgcttcaaacgcactcggtgccaggtaaacaccttcgtccagcatcatatggaagaaacgcttaaagcgttccacgtcacaggccatcacatcctgatagcacgtcacggactcggcgtcggtaaagaaaataccgaacatgccgccaacgtggttaacgaccagcggaattccggcttcttctgccgcttccagcagaccttctgccagacgtgttgtcagctcatccagcgtttcgtgaacgcccggctgcgcgacttcattcagacaggcgaaacccgctgccatcgcaatcgggttaccggaaagcgtacccgcctgatagaccggacccgtcggggccagcgcatccattacatcacgacgaccaccgaatgcgcctaccggcattccaccgccgatgattttgccgaggcaggttaaatctggcactacgccgtaataatcctgtgcgccagctagcgctacgcggaaaccggtcatcacttcatcgatgatcagcaacgcgccaaattcgtcgcacagcgcgcgcagacctggcaggaactctggcagcggcggaacacagttcatattgcctgccaccggctcgacgataatacaggcaatctcttgcgggtattgctcaaatgcggcgcgtacagaagccagatcattataagtacaggttaaggtatatttggcgaaatctgccggaacgcccgggctgtttggctggcctaacgtgagtgcgccagaaccggctttcaccagcaggcagtcagcgtgaccatggtaacacccttcaaatttaataattttgtcgcgaccggtaaaaccacgggccaggcggatggcgctcatggtcgcttcagtgccggagttcaccatgcgcaccatatccatggtcgggaccagttcggtcaccagttgcgccattttcacttccatttcggttggtgcaccaaagcttaaaccacgctcggcggcttcaatcacggcattgcggattgccggatggttatggcccagcaccatcggcccccaggaaccgacataatcgatataggctttgccatcaacatcgtacagataagcgccgtccgctttttcgataaacagtggagtgccgcccacgccagtaaaggcgcgaacaggggagttcacaccgccagggatcagctcgcgcgctgcgctgtaaagattttcagacttactcatggagggttcctgattcgtagaaaaagtgaatggctgctattctatgttattcataacaagttaaatactcgtcaaacatcaggctgcttgtactggtgcaatcctgatttcttagagtataaaagttttgtgcatttgaaacattacgctttgcaaaggattttcatggaacgtgcgagtaaaatgccgtcatcttatttgtatgaccaataagtgatcattggatgaaaactgatactccctctttagaaacaccgcaggccgcgcgcctgcgacgcagacaactgattcgccaacttcttgagcgcgataaaaccccgttagccattttgtttatggcggcagtcgtcggcacgcttgttgggctggcagcggttgcttttgacaaaggtgtcgcctggttgcagaaccaacgtatgggggcgctggtacatactgctgataattatccgcttctgttaaccgtcgcttttctctgtagcgcggtgctggcgatgtttggctactttttggtgcgcaaatacgcgccggaagcaggtggtagcgggatcccggaaattgaaggggcgctggaagatcaacgtcccgttcgctggtggcgtgtattgccggtgaagttctttggcgggctggggacactcggcggaggcatggtgttggggcgcgaagggccaaccgtgcagatcggcggtaacattggccgtatggtgcttgatattttccgcctgaaaggtgacgaagctcgccatacgctgctggcaaccggtgctgctgcggggctggctgcggcctttaacgcgccgctggcgggtattttgtttattatcgaagagatgcgtccgcagtttcgctatacgttaattagcattaaagcggtatttattggtgtcattatgagcaccattatgtaccggatttttaatcatgaagttgcgttgattgacgtcggtaaactttctgatgcgccgcttaatacgctgtggctttatctgatcctcggtattatttttggcattttcggccctatttttaataaatgggtgctggggatgcaggatttgctgcaccgtgtgcacggcggcaatattaccaaatgggtgctaatgggcggtgcgattggcggtctgtgtggattgctggggtttgtggcaccagcaacgagcggcggcggttttaacctgattcctatcgctaccgcggggaatttcagcatgggaatgctggtgtttatcttcgtcgcgcgggtcattaccaccttactctgcttctcttccggcgcgccgggcggtatttttgccccgatgctggcgctgggtactgtgctgggaaccgctttcggaatggttgccgttgagctgtttccgcaatatcaccttgaggcggggacgtttgctattgccggaatgggggcattactggcggcatctattcgcgcgccgttaacggggatcattctggttctggagatgaccgataactaccagctcattttgccaatgattattaccggtcttggcgcaacactattagcgcaatttaccggcgggaaaccgctatacagcgcgattcttgcgcgcacgctggcaaaacaggaagctgagcaactggcgcgaagcaaggccgcaagtgccagcgagaatacttgaacgaaataccagggtattagataatggcgattattattgggttagaatttgcccaattgccgatgtcgtttggagcaaaatatgagtgatgacgtagcactgccgctggagtttaccgacgcagcagccaacaaagttaaaagcctgatcgctgacgaagataacccgaatctgaaattacgcgtgtatatcaccggtggcggttgcagcggcttccagtatggtttcacctttgatgatcaggtgaacgaaggcgatatgaccatcgaaaaacagggcgttggcctggtggttgatccgatgagcctgcaatatctggtcggcggttccgttgattataccgaaggtctggaaggttctcgtttcatcgtgaccaacccgaacgcgaaaagcacctgcggttgcggttcttcctttagtatctaatctgttgttcatgtgccggataaactatccggcacatcttctctcttcaacgcccattctcatccagcgcaaacgtcggtagcttaagatgccaacgaatagccgccagccgaatcaatagcgtcacgaccatgcccatcatactggctgtttccagtggtacggaaaatgtgtaataagccgtagcgtggacaataccgccgataatacaggcagttgcgtagatttctgtacgtaaaatcatggggatttcgcgggccagaacatcacgaatgatcccgccgccaacgccagtaatgacgcccatacaaaccgcgattaacggaccggcttccgcattaaaggctttattcacgccaatgccgacaaacaccgccagaccaacggcgtccagcaccggcaacatccattttggtaagcgtcttggctggcgcaccagcacgatggtcagcatgctggtgaccattgcaacgaccagatcggtgggatctttcacccaaaataccgggccgtgatccagcgccatgtcgcgaattgtcccgccgcctactgcggttaccacgcccagtaccagaacaccaaaagggtccatacgcaattttccggctaacaaaacgccggagatggcaaataccgctgtgccgactatatccagccaatagacgagcattgttcaatccccactgagcacctgaaaaggtcaggcgttaatctacctgactaagcgcattacagagctgttgtgcagcgaggataatacgtgggcttgcacgttcaaaccagtcactcgtgagaggaataacgggaattttgagctgttcaccccagtattgtttgattttaggaatttggtccggtccgcctgtaatgacaatcgcctgtgggctgcgtgctaacacctgttcgcggctaacttgcggccagggaacccggctgtctttaaagatgttttctccgccacaaacttcgagtacctggttctgaatgctctcttttccactggtaaatggcggattaatgccgaattgcagaaaaacacgttttttaggtttatcagcatattgcgctttcaattgcgcgtactgatccagcagggattgcgcggcttgttcggccttgtctggttgcggactccagggggccagttgacgtaacgcattggcaatttgttcaatgcttgtcgcatcgacccacatcacttttattcccaggctagccagctggtcaacctgccgctcggcattacctccacgccaggcaatcaccagatcgggtttcagcgcgacaatgcgttccagattcatcccctgccaggtggaaacctgctcaatcttttgcgcttgtggaggatagtcggaatagctgctgaccccaaccggcgtgatcccggcggcaaaggcaagttcagtgttggcgggagaaagcgtgatgacgcgcggcgcggcgttgagccacagtggcgcaagaaaagacagggcgaccagcgccctgaacagactcttagccatgtgcaagtttctgcaccagactctcaaccatcaggctggactgtttagcggcaacagccaggaactcatcgaagctaagatgagactgttgatcggccacgtcggagatggcgcgtacgacaacaaacgggacgttgaaattgtggcagacatgggcgattgccgtcgcttccatctctacagcaatggcctgtgggaagttgtggcggattttcgccagaccaacagaaccgttgatgaaagcgtcgccgctaacaatcaggccacgtacagcgttaagattcagttcggcaatgcaggcctcagcggcagcgatcagtttatcgtcagctttaaagcctgccggacagcctggtaactgaccgtattcataaccaaatgccgtgacatccgcgtcgtgataacgtgcttcgtcgctgacaacgatatcgcccactttcaacgttggtgccaggccaccggcagaaccggtgttaataatcacatctggcttgcagtgttccaacagcaaagtggcacccagcgccgcagcgactttaccgatgccgcttttcagaagcgcaacctcggttccattcagttggccggtatagatttcgcaaccgccgagactgatagtttgacggttttcgattttgtcacgcagcagcgtaacttcttcttccattgcaccaatgatgccgattttcatagatttactcgcgataagcccgatttgaaggcatagtttaccatgcgcttacggggaagcgtatttctcacgcgggagaggacatggcacagattgatttccgaaaaaaaataaactggcatcgtcgttaccgtagtccgcagggcgttaaaaccgaacatgagatcctgcggatcttcgagagcgatcgcgggcgtatcatcaactctccggcaattcgtcgtctgcaacaaaagacccaggtttttccactggagcgcaatgccgccgtgcgcacgcgtcttacccacagcatggaagtccagcaggtggggcgctacatcgccaaagaaattttaagccgtctgaaagagcttaaattactggaagcatacggcctggatgaactgaccggtccctttgaaagcattgttgagatgagttgcctgatgcacgatatcggcaatccgccgtttggtcattttggcgaagcggcgataaatgactggtttcgccaacgtttgcacccggaagatgccgaaagccagcctctgactgacgatcgctgcagcgtggcggcactacgtttacgggacggggaagaaccgcttaacgagctgcggcgcaagattcgtcaggacttatgtcattttgaggggaatgcacaaggcattcgcctggtgcatacattgatgcggatgaatctcacctgggcacaggttggcggtattttaaaatatacccgtccggcgtggtggcgtggcgaaacgcctgagacacatcactatttaatgaaaaagccgggttattatctttctgaagaagcctatattgcccggttgcgtaaagaacttaatttggcgctttacagtcgttttccattaacgtggattatggaagctgccgacgacatctcctattgtgtggcagaccttgaagatgcggtagagaaaagaatatttaccgttgagcagctttatcatcatttgcacgaagcgtggggccagcatgagaaaggtagcctctttagcctggtggttgaaaatgcctgggaaaaaagtcgcagtaatagtttaagccgcagtacggaagatcagttttttatgtatttacgggtaaacaccctaaataaactggtaccctacgcggcacaacgatttattgataatctgcctgcgattttcgccggaacgtttaatcatgcattattggaagatgccagcgaatgcagcgatcttcttaagctatataaaaatgtcgctgtaaaacatgtgtttagccatccagatgtcgagcggcttgaattgcagggctatcgggtcattagcggattattagagatttatcgtcctttattaagcctgagcttaagtgactttactgaactggtagaaaaagaacgggtgaaacgtttccctattgaaagccgcttattccacaaactcagcacgcgccatcggctggcctatgtcgaggctgtcagtaaattaccgagtgattctcctgagtttccgctatgggaatattattaccgttgccgcctgctgcaggattatatcagcggtatgaccgacctctatgcgtgggatgaataccgacgtctgatggccgtagaacaataaccaggcttttgtaaagacgaacaataaatttttaccttttgcagaaactttagttcggaacttcaggctataaaacgaatctgaagaacacagcaattttgcgttatctgttaatcgagactgaaatacatgaaaaaaaccacattagcactgagtgcactggctctgagtttaggtttggcgttatctccgctctctgcaacggcggctgagacttctagtgcaacgacagcccagcagatgccaagccttgcaccgatgctcgaaaaggtgatgcctagtgtggtcagcattaacgtagaaggtagcacaaccgttaatacgccgcgtatgccgcgtaatttccagcagttcttcggtgatgattctccgttctgccaggaaggttctccgttccagagctctccgttctgccagggtggccagggcggtaatggtggcggccagcaacagaaattcatggcgctgggttccggcgtcatcattgatgccgataaaggctatgtcgtcaccaacaaccacgttgttgataacgcgacggtcattaaagttcaactgagcgatggccgtaagttcgacgcgaagatggttggcaaagatccgcgctctgatatcgcgctgatccaaatccagaacccgaaaaacctgaccgcaattaagatggcggattctgatgcactgcgcgtgggtgattacaccgtagcgattggtaacccgtttggtctgggcgagacggtaacttccgggattgtctctgcgctggggcgtagcggcctgaatgccgaaaactacgaaaacttcatccagaccgatgcagcgatcaaccgtggtaactccggtggtgcgctggttaacctgaacggcgaactgatcggtatcaacaccgcgatcctcgcaccggacggcggcaacatcggtatcggttttgctatcccgagtaacatggtgaaaaacctgaccagccagatggtggaatacggccaggtgaaacgcggtgagctgggtattatggggactgagctgaactccgaactggcgaaagcgatgaaagttgacgcccagcgcggtgctttcgtaagccaggttctgcctaattcctccgctgcaaaagcgggcattaaagcgggtgatgtgatcaccagtctgaacggtaagccgatcagcagctttgccgcactgcgtgctcaggtgggtactatgccggtaggcagcaaactgaccctgggcttactgcgcgacggtaagcaggttaacgtgaacctggaactgcagcagagcagccagaatcaggttgattccagctccatcttcaacggcattgaaggcgctgagatgagcaacaaaggcaaagatcagggcgtggtagtgaacaacgtgaaaacgggcactccggctgcgcagatcggcctgaagaaaggtgatgtgattattggcgcgaaccagcaggcagtgaaaaacatcgctgaactgcgtaaagttctcgacagcaaaccgtctgtgctggcactcaacattcagcgcggcgacagcaccatctacctgttaatgcagtaatctccctcaaccccttcctgaaaacgggaaggggttctccttacaatctgtgaacttcaccacaactccatacatcttcatcatcctttaggcatttgcacaatgccgtacgttacgtacttccttatgctaagccgtgcataacggaggacttatggctggctggcatcttgataccaaaatggcgcaggatatcgtggcacgtaccatgcgcatcatcgataccaatatcaacgtaatggatgcccgtgggcgaattatcggcagcggcgatcgtgagcgtattggtgaattgcacgaaggtgcattgctggtacttagtcagggacgagtcgtcgatatcgatgacgcggtagcacgtcatctgcacggtgtgcggcaggggattaatctaccgttacggctggaaggtgaaattgtcggcgtaattggcctgacaggtgaaccagagaatctgcgtaaatatggcgaactggtctgcatgacggctgaaatgatgctggaacagagccggttgatgcacttgttggcgcaggatagccgtttgcgggaagaactggtgatgaacctgattcaggcagaggagaatactcccgcacttactgaatgggcgcaacggctggggatcgatctcaatcaaccgcgagtggtggctattgttgaggtcgacagcggtcagcttggcgtggacagcgcaatggcggagttacaacaactgcaaaacgcgctgactacgcccgagcgtaataatctggtggcgattgtcagcctaaccgaaatggtggtgttgaaaccggcgttgaactcttttgggcgctgggatgcagaagatcatcgtaagcgagttgaacaactgattacccgcatgaaagagtacggccagctgcgttttcgcgttagtctgggcaactattttaccggtcctggcagtattgcccgatcctatcgtacggcgaaaacgacgatggtggtgggtaaacagcggatgccagaaagtcgctgctatttttatcaggatctgatgttacctgtgttactcgacagtttgcgtggcgactggcaggccaacgaactggcgcgaccgctggcgcggctgaaaacgatggacaataacggcttgctgcgacgaacgctggcggcgtggtttcgccacaatgtgcaaccgctggcaacgagtaaggcgttgtttattcatcgtaataccctggagtatcggcttaatcgtataagcgaactgaccgggcttgatttgggcaattttgatgacaggttgctgctgtatgtggcgttacaactggatgaagagcggtaagttatgcgttaaggttgaggcggcgctggctcattcccctcagcccgaagggtagaggggaatgcccgaattaaccgtcagttcgggattatttacgcgttagtttttccagatcggcttcaatctcgctgatcttattggttacgacactctccaggtgacgtaagtcgtcgaggatcttacgcttaagatcaacttcgctgcggtcacgctggcagatttgatcaagctcatcaatgatataccgtagattcgggctgatttcctggacttctttataaccctgacccacaccatcagcgacgaccgttttacgctgacgcggatatttaaacttaacgctcttggcgaaaaactcgcctttgtctttctggaaatagattttcagaatatcgttgttggcttcctgccggaggctgtaacgatcaatttcttcaggattggtaatacccagacttttcagattgtcgtacatagcgttacctcaaaatgagtcagtaaattgtgcttattttagcatttggcctggcccgcccggctcgactgtgatcgcagaaagcctttttcttccagacttctatcatggcgtaaaaatcaaaaaattacctgctttattctggtgataaaattcacgatttacaccagttccagcatcgttacttccgggcggcagttcagacgcaaaccatacaaactgcccacgccacgggttgtgtagatgtgtctttcgccaaaggcatttaatccggcgacgtaacgtttatcttcgacaggggcaaaaggttcaccaaccaacggtacgcgcagttgcccgccgtgagtatggccgcacagcatcagatcccagggttcatcacgcatgacttctttgctgtcgggattatgcgccagcaccagtcttggcagattggcttcgctggcgggaggcggtttgcattgtccggcccataagtcaccagtgcctaccagttcgaattgcctgttcggcgtggcgatcaccgtagcctggttaaacaacaccgtgatgcccgcacttttcaacgtctcgccaattaagtgatttttttctgtaccaacagggcgatcgtggttgccgaagcaggcaaacgtcggcgcacattcggcaaggggggagagtacgtcactaaacgcgctaaaattcaggctcatatcaaataatacgtaatcgccgcccagtaatatcaaatcgggcttttgttctatgccaagagcaatcgcgtcagaaatcaggcttaaaggaacaaaacgagagtaatggagatcggccagaaaaagaattttgaatggtgctgcgttgtctttaaaaaaggcgaggcggtgacggattaattcaaaccagcctggctcacagtaatgcatataaccgaaaccactgctcgtggctatcgtcgcggcagtagcctgcaaaaatcggcggcgactaatcatcgctcatccctgcaaaaaaatcgggcagcgtcgtgctgcccgtgtgcatacttttagtcgatggtacgcagcagttcgttaatgccgactttgccgcgagttttcgcgtcaactttcttaacgataaccgcacagtagaggctgtatttgccatctttactcggcagattaccactaacaaccacagaccccgccggaacgcgaccgtagtggatttcgccggtttcacggtcgtaaatacgggtgctctgaccaatgtatacgcccatggaaatgacggaaccttcttcgacaatcaccccttcaaccacttcagagcgcgcgccgatgaagcaattatcttcaatgatggttgggttagcctgcagcggttccagcacgccgccgatgcccacgccaccggaaaggtggacgtttttaccaatctgcgcacaagaaccgacggtcgcccaggtatcaaccatggtgccttcatcaacatatgcgccgatgttgacgtaagacggcatcagcacggtgttacgggcaataaacgcaccctgacgtaccgccgctggtggcacaacgcggaagccttctttctggaaacgtgcttcgtcgtagtcggcgaatttcatcggcactttgtcgaagtagcggctttctgccccttcgatcacctgattatcattaatacggaaagagagcagcaccgcttttttcaaccactgatgcgtcacccactgaccgtcaattttttccgctacacgcagtgcgccggaatccagcagggcgatcacctgatttaccgcttcgcgggtaacggtgtctgcattggctggcgtgatctcggcacggcgttcaaaagcggtttcaataatgttctgtaactgctgcattgttaaactcttttcatatcagtaaacacatcaccctttatcgtttggattgagggcctctgtcaaccgctgatgcacttcctgctgcaactcgttattaagcgcacgccggtcagcggtggcaattatgaataaatcttctactcgctcgccaatggttgtaattcgggcaccatgaaggctaattcccagatcggcaaaaattttcccgactcgcgccagcagtccaggttggtcgagggcgatcagttcgaggaagcttttgcggtcggtatgggtcggcaaaaacgttacttcggtttcaacagtaaaatggcgtaatttggcgggttggcgacggggctgcggtggctgccagctactttgcgtcagtacttgctccagaccaaaccgaataacctcatgacgatctgcggacagcgggttgccatcgggttccagcacgataaaggtatccatcgccataccgtcgcgagtggtgaaaatttgtgcgtcgtgaacacttaaattgcggcggtctaattcggcacagacggcggcaaacagataagggcggtccgggctccagataaaaatctcggtgcctccacgcgtagcctgcgggctaagcaataccagcggtttgcttaaatcatgctgtaataaatggcgggcatgccaggccagttgatttgggctatggcggacaaaatagttagcacgacagcgactccaaatttggtgcagcgcctcttcgtcgatgttatccatgcgcagtagtgccagtgcctggagttggtgatggcgaacccgttcgcgcatatccggcgtgttttgcattccgcgtcgtagctgcttttcggtggcaaagtagagctcacgcaacagactttgcttccagctattccacagcgtttcgttggtggcgcaaatgtcagccacagtcaggcataccagatagcgcagacgattttccgtttgcacttcttcggcaaactgcttgatgacttccgggtcctgaatatcgcggcgttgggcggtcacgctcatcaacaggtgctggcgaaccagccaggcgaccagctgtgtttcgcgactgttcagcccgtggagttcggcaaaatgcactacatcctgagcaccgagaatggagtggtcgccgccgcgtcctttggcgatatcgtgaaacagcgcggcgatgaaaatcagctcagtactcggcaggcgcggccagacgtccacacacaacggatggcgctggcgcgtttcttcactggcaaaactctccagtttcagcatcacgcggatagtatgttcatccaccgtgtaggcgtggaacagatcaaactgcatctgcccgacgatatggctccattgcggcatatacgcgccgagcacgctatggcgatgcattggcaatagcccgcgccgcaccgctccggggtgacgcagaatgctcaaaaacagttttcgtgcttccggaatattacacagcggttgttgcagatggcgacgggcatggcgtaactggcgcagcgtggtggagtaaatgccggtgatcgcactgttgtgcaccatggtgtagaacatacgcaagatggcttccggctggcgcataaatagtgtttcatcacgcaggtcgattagcgtaccgcgtagctgaaactcatcgtcgattggacgtggtttttcgtcggcgggaagggcgaggatggcttcatcgaacagttgcagcagcatctggttgagttcactgacgcggcgtgtaacgcggaagtaatccttcatcatccgctcgaccggttcgttaccttcaccactgtaattcagacgctgggcgacgctaagctggcgatcgaataacaggcgattatcgtaacggctgacgaccagatgcagggcaaagcgaatacgccacaatatatgcagacattcgtttaattccgcccgctccgcactggttaagaagccaaacccgaccatttcatccaggcttgttgcgccaaaatgacggcgggccacccattgcagagtgtggatatcgcgcaagccgccagggctgcttttgatgtctggttcaaggttgtagctggtgccatggtaacgctgatggcgctggttctgttcttcaactttcgccgcgtagaacttgtcggaaggccagaatccttcgctgaaaatatgtttttgcagttcgaggaacagcgcaacatcgccaattaataagcgggattcgattaaattggtggcgacggttaaatcgcttaacccttccagcatgcactcttcaagcgtgcgcacgctatgaccgacttccagctttacatcccagagcagcgttaacagctcgcccactttttgcgcctgatcgtccgggagctttttacggcttaaaatcagtaaatcgacgtcactaagtggatgcagctcgccacgaccgtagccaccgacggcgaccaatgccaggtcggcaatctggctgaatcccgcttcaatccataatcgttgcaggagctggtcgataaactcggtgcgcgcctcaatcaactgttctgcagagatcccattgtcaaaggcatcacccagccaacgctggaaagtatcgatatgggcttttatcccaccgacggttaattcatcacggggccagacgcatggattttgcggttgaccgggcagggtggggagagcggtgtttgcgtactgttctggaagggtattcattgtgcgccacccataagattaaattatcgcattaaaaaagccggcattcgccggcttcatcttattcgtcgtggctgattatcgccgggatggtgtcatccttgcgtagcgtcagaatttcgcagccgttatcagtcaccacaatagtatgctcatattgtgcagacaagctgcgatctttggtttttaccgtccagccatctttcatggtgcggatctcttttttacccgcgttgaccattggctcgatggtgaacgtcatcccaggtttcagtacgacgttggtttcacgggagtcatagtgcagcacctgcggttcttcatggaagccgcgaccaataccgtgtccgcaatattcacgaacgacggagaagccttctgcttcgacaaatttctgaatcgccgcaccgatttcgcgcagattaatgcctggttttaccatgcgtagcgccaggtacaggctttcttgcgtgatgcggcacagacgttcgcccatgatggtcggcttaccgacgataaacattttgctggtatcgccgtggaaaccatctttgattacggtgacatcaatgttaacgatatcgccatctttcagcagcttagcatcgtccgggataccgtggcacaccacttcattaatagagatgcaaacggatttcggatagccgtgatagccgaggcaggcagaaaccgcgtgttgttcattaacaatgtaatcattacagatgcgatccagctcgccggtgctgacgcccggtttaacatacggttcgatcatctccagcacttcggcagccagtcggccagcgacgcgcattttttcgatatcttctggggtcttgatagagatagccattaattctgtccatcagcgtcggtgataccgacaatatatatgtaagtgccgtcaatggtatcacacccgggcaaattgagaatcattctgaatttcgccaaacgtgccactgaaggttttctataatagaaaattcgacgtctgatgctgtacacagcgccaacaattattggtgtccacgacgtatttgtggtataaagcgcgccggacttccgatccatttcgtatacacagactggacggaagcgacaatctcactttgtgtaacaacacacacgtatcggcacatattccggggtgccctttggggtcggtaatatgggatacgtggaggcataaccccaacttttatatagaggttttaatcatggcaactgtttccatgcgcgacatgctcaaggctggtgttcacttcggtcaccagacccgttactggaacccgaaaatgaagccgttcatcttcggtgcgcgtaacaaagttcacatcatcaaccttgagaaaactgtaccgatgttcaacgaagctctggctgaactgaacaagattgcttctcgcaaaggtaaaatccttttcgttggtactaaacgcgctgcaagcgaagcggtgaaagacgctgctctgagctgcgaccagttcttcgtgaaccatcgctggctgggcggtatgctgactaactggaaaaccgttcgtcagtccatcaaacgtctgaaagacctggaaactcagtctcaggacggtactttcgacaagctgaccaagaaagaagcgctgatgcgcactcgtgagctggagaaactggaaaacagcctgggcggtatcaaagacatgggcggtctgccggacgctctgtttgtaatcgatgctgaccacgaacacattgctatcaaagaagcaaacaacctgggtattccggtatttgctatcgttgataccaactctgatccggacggtgttgacttcgttatcccgggtaacgacgacgcaatccgtgctgtgaccctgtacctgggcgctgttgctgcaaccgtacgtgaaggccgttctcaggatctggcttcccaggcggaagaaagcttcgtagaagctgagtaataaggcttgataactcccccaaaatagttcgagttgcagaaaggcggcaagctcgagaattcccgggagcttacatcagtaagtgaccgggatgagcgagcgaagataacgcatctgcggcgcgaaatatgaagggggagagcccttatagaccaggtagtacacgtttggttagggggcctgcatatggccccctttttcacttttatatctgtgcggtttaatgccgggcagatcacatctccgaggattttagaatggctgaaattaccgcatccctggtaaaagagctgcgtgagcgtactggcgcaggcatgatggattgcaaaaaagcactgactgaagctaacggcgacatcgagctggcaatcgaaaacatgcgtaagtccggtgctattaaagcagcgaaaaaagcaggcaacgttgctgctgacggcgtgatcaaaaccaaaatcgacggcaactacggcatcattctggaagttaactgccagactgacttcgttgcaaaagacgctggtttccaggcgttcgcagacaaagttctggacgcagctgttgctggcaaaatcactgacgttgaagttctgaaagcacagttcgaagaagaacgtgttgcgctggtagcgaaaattggtgaaaacatcaacattcgccgcgttgctgcgctggaaggcgacgttctgggttcttatcagcacggtgcgcgtatcggcgttctggttgctgctaaaggcgctgacgaagagctggttaaacacatcgctatgcacgttgctgcaagcaagccagaattcatcaaaccggaagacgtatccgctgaagtggtagaaaaagaataccaggtacagctggatatcgcgatgcagtctggtaagccgaaagaaatcgcagagaaaatggttgaaggccgcatgaagaaattcaccggcgaagtttctctgaccggtcagccgttcgttatggaaccaagcaaaactgttggtcagctgctgaaagagcataacgctgaagtgactggcttcatccgcttcgaagtgggtgaaggcatcgagaaagttgagactgactttgcagcagaagttgctgcgatgtccaagcagtcttaattatcaaaaaggagccgcctgagggcggcttctttttgtgcccatcttgtaaattcagctaacccttgtggggctgcgctgaaaagcgacgtacaatgtcgctagtattaattcatttcaatcgttgacagtctcaggaaagaaacatggctaccaatgcaaaacccgtctataaacgcattctgcttaagttgagtggcgaagctctgcagggcactgaaggcttcggtattgatgcaagcatactggatcgtatggctcaggaaatcaaagaactggttgaactgggtattcaggttggtgtggtgattggtgggggtaacctgttccgtggcgctggtctggcgaaagcgggtatgaaccgcgttgtgggcgaccacatggggatgctggcgaccgtaatgaacggcctggcaatgcgtgatgcactgcaccgcgcctatgtgaacgctcgtctgatgtccgctattccattgaatggcgtgtgcgacagctacagctgggcagaagctatcagcctgttgcgcaacaaccgtgtggtgatcctctccgccggtacaggtaacccgttctttaccaccgacagtgcagcttgcctgcgtggtatcgaaattgaagccgatgtggtgctgaaagcaaccaaagttgacggcgtgtttaccgctgatccggcgaaagatccaaccgcaaccatgtacgagcaactgacttacagcgaagtgctggaaaaagagctgaaagtcatggacctggcggccttcacgctggctcgtgaccataaattaccgattcgtgttttcaatatgaacaaaccgggtgcgctgcgccgtgtggtaatgggtgaaaaagaagggactttaatcacggaataattcccgtgatggataaataagggtaagattccgcgtaagtatcgcgggggcgtaagtctggttataaggcgttattgttgcaggcagtttggtcacggccagcgcgcagcaaccggagcgtacaaaagtacgtgaggatggcgagcactgcccggggccaaaatggcaaataaaatagcctaataatccagacgattacccgtaatatgtttaatcagggctatacttagcacacttccactgtgtgtgactgtctggtctgactgagacaagttttcaaggattcgtaacgtgattagcgatatcagaaaagatgctgaagtacgcatggacaaatgcgtagaagcgttcaaaacccaaatcagcaaaatacgcacgggtcgtgcttctcccagcctgctggatggcattgtcgtggaatattacggcacgccgacgccgctgcgtcagctggcaagcgtaacggtagaagattcccgtacactgaaaatcaacgtgtttgatcgtagtatgtctccggccgttgaaaaagcgattatggcgtccgatcttggcctgaacccgaactctgcgggtagcgacatccgtgttccgctgccgccgctgacggaagaacgtcgtaaagatctgaccaaaatcgttcgtggtgaagcagaacaagcgcgtgttgcagtacgtaacgtgcgtcgtgacgcgaacgacaaagtgaaagcactgttgaaagataaagagatcagcgaagacgacgatcgccgttctcaggacgatgtacagaaactgactgatgctgcaatcaagaaaattgaagcggcgctggcagacaaagaagcagaactgatgcagttctgatttcttgaacgacaaaaacgccgctcagtagatccttgcggatcggctggcggcgttttgctttttattctgtctcaactctggatgtttcatgaagcaactcaccattctgggcagcaccggcagcattggttgcagcacgctggacgtggtgcgccataatcccgaacacttccgcgtagttgcgctggtggcaggcaaaaatgtcactcgcatggtagaacagtgcctggaattctctccccgctatgccgtaatggacgatgaagcgagtgcgaaacttcttaaaacgatgctacagcaacagggtagccgcaccgaagtcttaagtgggcaacaagccgcttgcgatatggcagcgcttgaggatgttgatcaggtgatggcagccattgttggcgctgctgggctgttacctacgcttgctgcgatccgcgcgggtaaaaccattttgctggccaataaagaaagtctggttacctgcggacgtctgtttatggacgccgtaaagcagagcaaagcgcaattgttaccggtcgatagcgaacataacgccatttttcagagtttaccgcaacctatccagcataatctgggatacgctgaccttgagcaaaatggcgtggtgtccattttacttaccgggtctggtggccctttccgtgagacgccattgcgcgatttggcaacaatgacgccggatcaagcctgccgtcatccgaactggagcatggggcgtaaaatttctgtcgatagcgctaccatgatgaacaaaggtctggaatacattgaagcgcgttggctgtttaacgccagcgccagccagatggaagtgctgattcacccgcagagtgtgattcacagtatggtgcgctatcaggacggcagtgttctggcgcagctgggggaaccggatatgcgtacgccaattgcccacaccatggcatggccgaatcgcgtgaactctggcgtgaagccgctcgatttttgcaaactaagtgcgttgacatttgccgcaccggattatgatcgttatccatgcctgaaactggcgatggaggcgttcgaacaaggccaggcagcgacgacagcattgaatgccgcaaacgaaatcaccgttgctgcttttcttgcgcaacaaatccgctttacggatatcgctgcgttgaatttatccgtactggaaaaaatggatatgcgcgaaccacaatgtgtggacgatgtgttatctgttgatgcgaacgcgcgtgaagtcgccagaaaagaggtgatgcgtctcgcaagctgaggataatccggctacagagagtcgcgctatttgttagcgtagggcttcagtgatatagtctgcgccatctgatcgtaagtagttggctttataaggtcagatatgccgtggttttacacggcttttttttgtataggcttcagtattcctgagtaccgtaaaccctgtcagggaataaaaaacgcgtgatgttgtctgctactcaaccacttagcgaaaaattgccagcgcatggctgccgtcatgttgcgatcattatggacggcaatggccgctgggcaaaaaagcaagggaagattcgtgcctttgggcataaagccggggcaaaatccgtccgccgggctgtctcttttgcggccaacaacggtattgaggcgttaacgctgtatgcctttagtagtgaaaactggaaccgaccagcgcaggaagtcagtgcgttaatggaactgtttgtgtgggcgctcgatagcgaagtaaaaagtctgcaccgacataacgtgcgtctgcgtattattggcgataccagtcgctttaacagccgtttgcaagaacgtattcgtaaatctgaagcgctaacagccgggaataccggtctgacgctgaatattgcggcgaactacggtggacgttgggatatagtccagggagtcaggcaactggctgaaaaggtgcagcaaggaaacctgcaaccagatcagatagatgaagagatgctaaaccagcatgtctgtatgcatgaactggcccctgtagatttagtaattaggactgggggggagcatcgcattagtaactttttgctttggcaaattgcctatgccgaactttactttacagatgttctctggcccgatttcgatgaacaagactttgaaggggcgttaaatgcctttgctaatcgagagcgtcgtttcggcggcaccgagcccggtgatgaaacagcctgatgggggtcgcttttgctgaagtatcgcctgatatctgcttttgtgttaatacccgtcgtcatcgcggcgttgtttctgttgccgccggtggggttcgccattgtaacgctggtggtctgcatgctggcagcgtgggaatggggacagcttagcggttttaccactcgtagccagcgagtatggttggcggtgttatgcgggttattgttggcgctgatgctttttctgttgccggaatatcaccgaaatattcatcaaccgctggttgaaatcagtctttgggctagcctgggttggtggattgtcgcgctattgctggtgctgttttacccaggttccgcagcaatctggcgtaactctaaaacattgcgccttatttttggcgtgctaaccattgttcccttcttctggggcatgctggcgttacgggcctggcactatgacgagaatcattacagtggcgcaatatggttgctctatgtcatgatcctggtatggggcgctgactccggcgcatatatgtttggcaaattgtttggtaaacataagctggcaccgaaggtttctccgggtaaaacctggcaaggctttatcggtggactcgctactgcagcggtaatcagttggggttatggcatgtgggcgaatctcgacgtcgctcccgtcaccttactcatttgctctattgtcgcagcgttagccagtgtgctcggcgatctgaccgagagtatgtttaagcgtgaagcaggaattaaggacagcggtcatttaattccaggacacggtggtattttagatcgtattgatagcctgacggctgcggtaccggtctttgcttgcttgttgttactggtattcaggacgctttaacggaaggtaatatgctgagttttctctgggatttggctagcttcatcgttgcactgggtgtacttatcaccgtgcatgaatttggtcatttctgggttgcccggcgttgtggtgttcgcgttgagcgtttcagtatagggtttggtaaggcgctctggcggcgaactgataagctcggcaccgaatatgttatcgccctgatcccgttgggcggttatgtcaaaatgctggatgagcgcgcagaaccggtcgttccggaactccgccaccatgccttcaataataaatctgtcggccaacgagcggcgattattgccgcaggtccggttgcaaacttcatttttgctatctttgcctactggctggtttttattattggtgtgcctggcgtacgtccggtggttggcgaaatagcagccaatagcatagctgcggaagcacaaattgcaccaggtacggaactaaaagccgtagatggtatcgaaacgcctgattgggatgccgtgcgtttgcagttggtcgataaaattggcgatgaaagcaccaccattacagtagcgccatttggcagcgaccaacggcgggatgtaaagctcgatttacgtcactgggcgtttgagcctgataaagaagatccggtatctagcctggggattcgtcctcgtgggccgcaaattgaacctgtactggaaaatgtgcagccaaacagcgcggcaagcaaggcaggtttgcaagcaggcgacaggatcgttaaagtcgatggtcagcccttaacgcagtgggtgacctttgtgatgcttgtccgggataacccgggtaaatccttagcgttagaaatcgaaaggcaggggagtcccttgtctttgacattaatcccggagagtaaaccgggtaatggtaaagcgattggttttgtcggtattgagccgaaagtcattcctttgccagatgagtataaagttgtacgccagtatgggccgttcaacgccatcgtcgaagccacggacaaaacgtggcagctgatgaagctgacggtcagtatgctgggaaaattgatcaccggtgatgtgaaactgaacaacctcagtgggccgatctctatcgccaagggggctgggatgacagcggaactcggggttgtttattacctgccgtttcttgcgcttattagcgtgaacttagggataattaacctgtttccgttgcccgtacttgacggggggcatctgctgttccttgcgatcgaaaagatcaagggcggaccggtatccgagcgggttcaagacttttgttatcgcattggcagcattctgctggtgctgttaatggggcttgcacttttcaatgatttctctcggttatgagagttagttaggaagaacgcataataacgatggcgatgaaaaagttgctcatagcgagcctgctgtttagcagcgccaccgtatacggtgctgaagggttcgtagtgaaagatattcatttcgaaggccttcagcgtgtcgccgttggtgcggccctcctcagtatgccggtgcgcacaggcgacacggttaatgatgaagatatcagtaataccattcgcgctctgtttgctaccggcaactttgaggatgttcgcgtccttcgtgatggtgatacccttctggttcaggtaaaagaacgtccgaccattgccagcattactttctccggtaacaaaagcgtgaaagatgacatgctgaagcaaaacctcgaggcttctggtgtgcgtgtgggcgaatccctcgatcgcaccaccattgccgatatcgagaaaggtctggaagacttctactacagcgtcggtaaatatagcgccagcgtaaaagctgtcgtgaccccgctgccgcgcaaccgtgttgacctaaaactggtgttccaggaaggtgtgagtgctgaaatccagcaaattaacattgttggtaaccatgctttcaccaccgacgaactgatctctcatttccaactgcgtgacgaagtgccgtggtggaacgtggtaggcgatcgtaaataccagaaacagaaactggcgggcgaccttgaaaccctgcgcagctactatctggatcgcggttatgcccgtttcaacatcgactctacccaggtcagtctgacgccagataaaaaaggtatttacgtcacggtgaacatcaccgaaggcgatcagtacaagctttctggcgttgaagtgagcggcaaccttgccgggcactccgctgaaattgagcagctgactaagatcgagccgggtgagctgtataacggcaccaaagtgaccaagatggaagatgacatcaaaaagcttctcggtcgctatggttatgcctatccgcgcgtacagagcatgcccgaaattaacgatgccgacaaaaccgttaaattacgtgtgaacgttgatgcgggtaaccgtttctacgtgcgtaagatccgttttgaaggtaacgataccagcaaagatgccgtcctgcgtcgcgaaatgcgtcagatggaaggtgcatggctggggagcgatctggtcgatcagggtaaggagcgtctgaatcgtctgggcttctttgaaactgtcgataccgatacccaacgtgttccgggtagcccggaccaggttgatgtcgtctacaaggtaaaagagcgcaacaccggtagcttcaactttggtattggttacggtactgaaagtggcgtgagcttccaggctggtgtgcagcaggataactggttaggtacaggttatgctgttggtatcaacgggaccaaaaacgattaccagacctatgctgaactgagcgtaaccaacccgtacttcaccgtagatggcgtaagcctcggtggtcgtctcttctataatgacttccaggcagatgacgccgacctgtccgactataccaacaagagttatggtacagacgtgacgttgggcttcccgattaacgaatataacagcctgcgtgcaggtctgggttatgtacataactccctgtccaacatgcagcctcaggttgcgatgtggcgttatctgtactctatgggtgaacatccgagcacctctgatcaggataacagcttcaaaacggacgacttcacgttcaactatggttggacctataacaagcttgaccgtggttacttcccgacagatggtagtcgtgtcaacctgaccggtaaagtgaccattcctggaagcgataacgaatactacaaagtgacgttagacacggcgacttatgtgccgatcgatgacgatcacaaatgggttgttctggggcgtacccgctggggttatggtgatggtttaggcggcaaagagatgccgttctacgagaacttctatgccggtggttccagcaccgtgcgtggcttccagtccaataccattggtccgaaagcagtttacttcccgcatcaggccagtaattatgatccggactatgattacgaatgtgcgactcaggacggcgcgaaagacctgtgtaaaagcgatgatgctgtaggcggtaacgccatggcggttgccagcctcgagttcatcaccccgacgccgtttattagcgataagtatgctaacagcgttcgtacttccttcttctgggatatgggtaccgtttgggatacaaactgggattccagccaatattctggatatccggactatagtgatccaagcaatatccgtatgtctgcgggtatcgcattacaatggatgtccccattggggccgttggtgttctcctacgcccagccgttcaaaaagtacgatggagacaaggcagaacagttccagtttaacatcggtaaaacctggtaagtgttctccacaaaggaatgtagtggtagtgtagcgatgactttaggcgatcaatataagatcgccgggccacgcaaagaactgcaccctccggtgcaaatgggatggtaaggagtttattgtgaaaaagtggttattagctgcaggtctcggtttagcactggcaacttctgctcaggcggctgacaaaattgcaatcgtcaacatgggcagcctgttccagcaggtagcgcagaaaaccggtgtttctaacacgctggaaaatgagttcaaaggccgtgccagcgaactgcagcgtatggaaaccgatctgcaggctaaaatgaaaaagctgcagtccatgaaagcgggcagcgatcgcactaagctggaaaaagacgtgatggctcagcgccagacttttgctcagaaagcgcaggcttttgagcaggatcgcgcacgtcgttccaacgaagaacgcggcaaactggttactcgtatccagactgctgtgaaatccgttgccaacagccaggatatcgatctggttgttgatgcaaacgccgttgcttacaacagcagcgatgtaaaagacatcactgccgacgtactgaaacaggttaaataagtaatgcctagtattcgactggctgatttagcgcagcagttggatgcagaactacacggtgatggcgatatcgtcatcaccggcgttgcgtccatgcaatctgcacaaacaggtcacattacgttcatggttaacccaaaataccgtgagcatttaggcttgtgccaggcgtccgcggttgtcatgacccaggacgatcttcctttcgcgaaaagtgccgcactggtagtgaagaatccctacctgacttacgcgcgcatggcgcaaattttagataccacgccgcagcccgcgcagaacattgcacccagtgcggtgatcgacgcgacggcgaagctgggtaacaacgtaagcattggcgctaacgcggtgattgagtccggcgttgaactgggcgataacgtgattatcggtgccggttgcttcgtaggtaaaaacagcaaaatcggtgcaggtagccgtctctgggcgaacgtaaccatttaccatgagatccagatcggtcagaattgcctgatccagtccggaacagtggtaggcgcagacggctttggttatgccaacgatcgtggtaactgggtgaagatcccacagattggtcgcgtaattattggcgatcgcgtggagatcggtgcctgcacaaccatcgatcgcggcgcgctggatgacactattattggcaatggcgtgatcattgataaccagtgccagattgcacataacgtcgtgattggcgacaatacggcggttgccggtggcgtcattatggcgggcagcctgaaaattggtcgttactgcatgatcggcggagccagcgtaatcaacgggcatatggaaatatgcgacaaagtgacggttacgggcatgggtatggtgatgcgtcccatcactgaaccaggcgtctattccagtggcattccgctgcaacccaacaaagtctggcgcaaaaccgctgcactggtgatgaacattgatgacatgagcaagcgtctgaaaagccttgagcgcaaggttaatcaacaagactaacgttccatcttttgttcgccaaactttacggcctgtctcattcttacgattgcggcaggccgtgttattattgtcgtttcttatattttgacaggaagagtatcttgactactaacactcatactctgcagattgaagagattttagaacttctgccgcaccgtttcccgttcttactggtggatcgcgtgctggattttgaagaaggtcgttttctgcgcgcagtaaaaaatgtctctgtcaatgagccattcttccagggccatttccctggaaaaccgattttcccgggtgtgctgattctggaagcaatggcacaggcaacaggtattctggcgtttaaaagcgtaggaaaactggaaccgggtgagctgtactacttcgctggtattgacgaagcgcgcttcaagcgcccggtcgtgcctggcgatcaaatgatcatggaagtcactttcgaaaaaacgcgccgcggcctgacccgttttaaaggggttgctctggtcgatggtaaagtagtttgcgaagcaacgatgatgtgtgctcgtagccgggaggcctgatacgtgattgataaatccgcctttgtgcatccaaccgccattgtggaagagggcgcgagtattggcgcgaacgcacacattggtcctttttgtatcgttggaccccatgtcgaaattggtgagggtaccgtactgaaatctcacgttgtcgtgaatggtcatactaaaattggccgcgataatgagatttatcagttcgcctccatcggcgaagttaaccaggatctgaaatatgctggcgaaccgacccgtgtggaaatcggcgatcgtaaccgcattcgcgaaagcgtcaccattcatcgtggcacagtccagggcggtggattgacgaaggtgggcagcgacaacttactgatgatcaacgcgcacattgcgcacgattgtacggtaggtaaccgctgtattctcgccaacaacgcaacgctggcgggtcacgtaagcgttgacgacttcgcgatcatcggcggcatgaccgcagtccatcagttctgcatcattggtgcgcacgtgatggttggcggctgctccggtgtggcgcaggacgtccctccttatgtcattgcgcagggtaaccacgcaacgccgttcggtgtcaatatcgaagggctgaagcgccgcggattcagccgtgaggcgattaccgctatccgcaatgcgtataagctgatttatcgtagcggtaaaacgctcgatgaagtgaaaccggaaattgctgaactggcggaaacatatccggaagtgaaagcctttaccgatttctttgcacgcagtacgcgcggtctgattcgttaatgactgaacagcgtccattaacgattgccctggtcgccggagaaacctccggcgatatcctgggggccggtttaatccgcgctctgaaagaacatgtgcccaacgcccgctttgttggtgttgccgggccacgaatgcaggctgaaggctgcgaagcctggtacgaaatggaagaactggcggtgatgggcattgttgaagtgctcggtcgtctgcgtcgcttactgcatattcgtgccgatctgacaaagcgttttggcgaactgaagccagatgtttttgttggtattgatgcgcctgacttcaatattactcttgaaggtaacctcaaaaagcagggtatcaaaaccattcattacgtcagtccgagtgtctgggcgtggcgacagaaacgtgttttcaaaataggcagagccaccgatctggtgctcgcatttctgcctttcgaaaaagcgttttatgacaaatacaacgtaccgtgccgctttatcggtcataccatggctgatgccatgccattagatccagataaaaatgccgcccgtgatgtgctggggatccctcacgatgcccactgcctggcgttgctaccggggagccgtggtgcagaagttgaaatgcttagtgccgatttcctgaaaacggcccagcttttgcgccagacatatccggatctcgaaatcgtggtgccactggtgaatgccaaacgccgcgagcagtttgaacgcatcaaagctgaagtcgcgccagaccttagtgttcatttgctggatgggatgggccgtgaggcgatggtcgccagcgatgcggcgctactggcgagcggtacggcagccctggagtgtatgctggcgaaatgcccgatggtggtgggatatcgcatgaagccttttaccttctggttggcgaagcggctggtgaaaactgattatgtcagcctgccaaatctgctggcgggcagagagttagtcaaagaattattgcaggaagagtgtgagccgcaaaaactggctgcggcgctgttaccgctgttggcgaacgggaaaaccagccacgcgatgcacgataccttccgtgaactgcatcagcagatccgctgcaatgccgatgagcaggcggcacaagccgttctggagttagcacaatgatcgaatttgtttatccgcacacgcagctggttgcgggtgtggatgaagtcggacgcgggccgttagttggcgcggtcgtcaccgctgcggtgatccttgacccggcgcgcccgattgccgggctgaatgattccaaaaagctgagcgaaaaacgccgtctggcgctctatgaagagatcaaagagaaagcgttgagctggagtctgggccgcgcggaaccccacgaaatcgacgagctgaacattcttcatgcgaccatgctggcgatgcagcgtgccgtcgctgggctgcatattgcgccggaatatgtgttgattgatggtaaccgctgcccgaaattaccgatgcctgcgatggctgtggtgaaaggcgatagccgcgtaccggaaatcagtgccgcgtctatcctggcgaaagtgacgcgtgacgccgaaatggcggcgctggatattgttttcccgcaatatggttttgcccaacacaaagggtacccaaccgcttttcatctggaaaaactggctgaacacggcgcgaccgaacaccatcggcgcagctttgggcctgtcaaacgcgcactgggacttgcgtcctgattcttgtgtcgagattaagtaaaccggaatctgaagatgtctgaaccacgtttcgtacacctgcgggtgcacagcgactacagcatgatcgatggcctggccaaaaccgcaccgttggtaaaaaaggcggcggcgttgggtatgccagcactggcgatcaccgatttcaccaacctttgtggtctggtgaagttctacggagcgggacatggcgcagggattaagcctatcgtcggggcagattttaacgtccagtgcgacctgctgggtgatgagttaacccacctgacggtactggcggcgaacaataccggctatcagaatctgacgttgctgatcagtaaagcgtatcagcgcgggtacggtgccgccgggccgatcatcgatcgcgactggcttatcgaattaaacgaagggttgatccttctttccggcggacgcatgggcgacgtcggacgcagtcttttgcgtggtaacagcgcgctggtagatgagtgtgtcgcgttttatgaagaacacttcccggatcgctattttctcgagctgatccgcaccggcaggccggatgaagaaagctatctgcacgcggcggtggaactggcggaagcgcgcggtttgcccgtcgtggcgaccaacgacgtgcgctttatcgacagcagcgactttgacgcacacgaaatccgcgtcgcgatccacgacggctttaccctcgacgatcctaaacgcccgcgtaactatagcccgcagcaatatatgcgtagcgaagaggagatgtgtgagctgtttgccgacatccccgaagcccttgccaacaccgttgagatcgccaaacgctgtaacgtaaccgtgcgtcttggtgaatacttcctgccgcagttcccgaccggggacatgagcaccgaagattatctggtcaagcgtgcaaaagagggcctggaagagcgtctggcctttttattccctgatgaggaagaacgtcttaagcgccgcccggaatatgacgaacgtctggagactgaacttcaggttatcaaccagatgggcttcccgggctacttcctcatcgttatggaatttatccagtggagcaaagataacggcgtaccggtagggccaggccgtggctccggtgcgggtagtctggtggcctacgcgctgaaaatcaccgacctcgatccgctggaatttgacctgctgttcgaacgtttccttaacccggaacgtgtctccatgcctgacttcgacgttgacttctgtatggagaaacgcgatcaggttatcgagcacgtagcggacatgtacggtcgtgatgcggtaagccagatcatcaccttcggtacaatggcggcgaaagcggtgatccgcgacgtaggccgcgtgctggggcatccgtacggctttgtcgatcgtatcagcaaactgatcccgcccgatccggggatgacgctggcgaaagcgtttgaagccgagccgcagctgccggaaatctacgaagcggatgaagaagttaaggcgctgatcgacatggcgcgcaaactggaaggggtcacccgtaacgccggtaagcacgccggtggggtggttatcgcgccgaccaaaattaccgattttgcgccgctttactgcgatgaagagggcaaacatccggtcacccagtttgataaaagcgacgttgaatacgccggactggtgaagttcgacttccttggtttgcgtacgctcaccatcatcaactgggcgctggagatgatcaacaagcggcgggcgaagaatggcgagccgccgctggatatcgctgcgatcccgctggatgataagaaaagcttcgacatgctgcaacgcagcgaaaccacggcggtattccagcttgaaagccgcggcatgaaggacctgatcaagcgtctacaacctgactgcttcgaagatatgatcgccctagtggcactgttccgccccggtccgttgcaaagtgggatggtggataactttatcgaccgtaaacatggtcgtgaagagatctcctatccggacgtacagtggcagcatgaaagcctgaaaccggtactggagccaacctacggcattatcctgtatcaggaacaggtcatgcagattgcgcaggtgctttctggttataccctcggtggcgcggatatgctgcgtcgtgcgatgggtaagaaaaagccggaagagatggctaagcaacgttctgtatttgctgaaggtgcagaaaagaacggaatcaacgctgaactggcgatgaaaatcttcgacctggtggagaaattcgctggttacggatttaacaaaagccactctgcggcctatgctttggtgagttatcaaacgttatggctgaaagcgcactatcctgcggagtttatggcggcggtaatgaccgccgatatggacaacaccgagaaggtggtgggtctggtggatgagtgctggcggatggggctgaaaatcctgccaccagatataaactccggtctttaccatttccacgtcaacgacgacggcgaaatcgtgtatggtattggcgcgatcaaaggggtcggtgaaggtccgattgaggccatcatcgaagcccgtaataaaggcggctacttccgcgaactgtttgatctctgcgcccgtaccgacaccaaaaagttgaaccgtcgcgtgctggaaaaactgatcatgtccggggcgtttgaccgtcttgggccacatcgcgcagcgctgatgaacagcctgggcgatgcgttaaaagcggcagatcaacacgcgaaagcggaagctatcggtcaggccgatatgttcggcgtgctggccgaagagccggaacaaattgaacaatcctacgccagctgccaaccgtggccggagcaggtggtattagatggggaacgtgaaacgttaggcctgtacctgaccggacaccctatcaaccagtatttaaaagagattgagcgttatgtcggaggcgtaaggctgaaagacatgcacccgacagaacgtggtaaagtcatcacggctgcggggctcgttgttgccgcgcgggttatggtcaccaagcgcggcaatcgtatcggtatctgcacgctggatgaccgttccgggcggctggaagtgatgttgtttactgacgccctggataaataccagcaattgctggaaaaagaccgcatacttatcgtcagcggacaggtcagctttgatgacttcagcggtgggcttaaaatgaccgctcgcgaagtgatggatattgacgaagcccgggaaaaatatgctcgcgggcttgctatcagcctgacggacaggcaaattgatgaccagcttttaaaccgactccgtcagtctctggaaccccaccgctctgggacaattccagtacatctctactatcagagggcggatgcacgcgcgcggttgcgttttggcgcgacgtggcgtgtctctccgagcgatcgtttattaaacgatctccgtggcctcattggtagcgagcaggtggaactggagtttgactaatacaggaatactatgagtctgaatttccttgattttgaacagccgattgcagagctggaagcgaaaatcgattctctgactgcggttagccgtcaggatgagaaactggatattaacatcgatgaagaagtgcatcgtctgcgtgaaaaaagcgtagaactgacacgtaaaatcttcgccgatctcggtgcatggcagattgcgcaactggcacgccatccacagcgtccttataccctggattacgttcgcctggcatttgatgaatttgacgaactggctggcgaccgcgcgtatgcagacgataaagctatcgtcggtggtatcgcccgtctcgatggtcgtccggtgatgatcattggtcatcaaaaaggtcgtgaaaccaaagaaaaaattcgccgtaactttggtatgccagcgccagaaggttaccgcaaagcactgcgtctgatgcaaatggctgaacgctttaagatgcctatcatcacctttatcgacaccccgggggcttatcctggcgtgggcgcagaagagcgtggtcagtctgaagccattgcacgcaacctgcgtgaaatgtctcgcctcggcgtaccggtagtttgtacggttatcggtgaaggtggttctggcggtgcgctggcgattggcgtgggcgataaagtgaatatgctgcaatacagcacctattccgttatcagcccggaaggttgtgcgtccattctgtggaagagcgccgacaaagcgccgctggcggctgaagcgatgggtatcattgctccgcgtctgaaagaactgaaactgatcgactccatcatcccggaaccactgggtggtgctcaccgtaacccggaagcgatggcggcaagcttgaaagcgcaactgctggcggatctggccgatctcgacgtgttaagcactgaagatttaaaaaatcgtcgttatcagcgcctgatgagctacggttacgcgtaattcgcaaaagttctgaaaaagggtcacttcggtggcccttttttatcgccacggtttgagcaggctatgattaaggaaggattttccaggaggaacacatgaacatcattgccattatgggaccgcatggcgtcttttataaagatgagcccatcaaagaactggagagcgcgctggtggcgcaaggctttcagattatctggccacaaaacagcgttgatttgctgaaatttatcgagcataaccctcgaatttgcggcgtgatttttgactgggatgagtacagtctcgatttatgtagcgatatcaatcagcttaatgaatatctcccgctttatgccttcatcaacacccacagcacgatggatgtcagcgtgcaggatatgcggatggcgctctggttttttgaatatgcgctggggcaggcggaagatatcgccattcgtatgcgtcagtacaccgacgaatatcttgataacattacaccgccgttcacgaaagccttgtttacctacgtcaaagagcggaagtacaccttttgtacgccggggcatatgggcggcaccgcatatcaaaaaagcccggttggctgtctgttttatgatttttcggcgggaatactcttaaggctgatgtctctattagcgtcaccgagcttggtagcttgctcgaccacaccgggccacacctggaagcggaagagtacatcgcgcggacttttggcgcggaacagagttatatcgttaccaacggaacaagcacgagcaacaaaattgtgggtatgtacgccgcgccatccggcagtacgctgttgatcgaccgcaattgtcataaaagcctggcgcatctgttgatgatgaacgatgtagtgccagtctggctgaaaccgacgcgtaatgcgttggggattcttggtgggatcccgcgccgtgaatttactcgcgacagcatcgaagagaaagtcgctgctaccacgcaagcacaatggccggttcatgcggtgatcaccaactccacctatgatggcttgctctacaacaccgactggatcaaacagacgctggatgtcccgagcattcacttcgattctgcctgggtgccgtacacccattttcatccgatctaccagggtaaaagtggtatgagcggcgagcgtgttgcgggaaaagtgatcttcgaaacgcaaagcacccacaaaatgctggcggcgttaagccaggctagcctgatccacattaaaggcgagtatgacgaagaggcctttaacgaagcctttatgatgcataccaccaccagccccagttatcccattgttgctagcgttgagacggcggcggcgatgctgcgtggtaatccgggcaaacggctgattaaccgtagtgtagaacgagctctgcattttcgcaaagaggtccagcggctgcgggaagagtctgacggttggtttttcgatatctggcaaccgccgcaggtggatgaagccgaatgctggcccgttgcgcctggcgaacagtggcacggctttaacgatgcggatgccgatcatatgtttctcgatccggttaaagtcactattttgacaccggggatggacgagcagggcaatatgagcgaggaggggatcccggcggcgctggtagcaaaattcctcgacgaacgtgggatcgtagtagagaaaaccggcccttataacctgctgtttctctttagtattggcatcgataaaaccaaagcaatgggattattgcgtgggttgacggaattcaaacgctcttacgatctcaacctgcggatcaaaaatatgctacccgatctctatgcagaagatcccgatttctaccgcaatatgcgtattcaggatctggcacaagggatccataagctgattcgtaaacacgatcttcccggtttgatgttgcgggcattcgatactttgccggagatgatcatgacgccacatcaggcatggcaacgacaaattaaaggcgaagtagaaaccattgcgctggaacaactggtcggtagagtaagcgcaaatatgatcctgccttatccaccgggcgtaccgctgttgatgcctggagaaatgctgaccaaagagagccgcacagtactcgattttctactgatgctttgttccgtcgggcaacattaccccggttttgaaacggatattcacggcgcgaaacaggacgaagacggcgtttaccgcgtacgagtcctaaaaatggcgggataacttgccagagcggcttccgggcgagtaacgtgctgttaacaaataaaggagacgttatgctgggtttaaaacaggttcaccatattgcgattattgcgacggattatgcggtgagcaaagctttctactgcgatattcttggtttcacgctgcaaagcgaagtctatcgcgaagcgcgcgacagttggaaaggggatttggcgcttaatgggcaatatgtgattgagcttttcagttttccgttcccgccggaacgacccagccgaccggaagcttgcggtctgcgtcatctggcttttagcgttgatgacatcgatgcggcagtggcgcaccttgaaagccataacgtgaagtgtgaaaccatccgtgtcgatccatacacgcaaaaacgcttcaccttctttaacgatccggacgggctgccgttggaactgtatgagcagtaaggcttgtcatcgccgcatttgcccggtaacgtgccgggcattgctactgtaaaatcgcaccatcatgacactcacgctcaatagacaacttctcaccagtcgccagattctggtggcctttagcggcgggcttgactccaccgttctgctgcatcagttggtgcagtggcggacggaaaatccgggtgtcgctctgcgcgctattcatgtgcatcacggtttaagtgccaatgccgatgcctgggttacgcattgcgaaaacgtctgccaacagtggcaggtgccgctggtggtcgaacgcgtacaacttgcgcaagaaggactgggcattgaggcccaggcgcggcaggcacgttatcaggcatttgcccgcaccttgttgcccggtgaagtgctggtcaccgcgcaacatctcgacgatcaatgtgaaacctttctgctggcgctaaaacgcggcagtggccctgccgggcttagcgctatggcggaagtcagcgagtttgccggaacgcggcttattcgcccgttgctcgcccgcacgcggggggaactggtgcagtgggcgcgtcagtatgatttacgctggattgaagacgaaagtaatcaggacgacagttacgatcgtaactttctgcgcctgcgcgtagtgccgttattgcagcagcgttggccgcattttgccgaagcaacggcccgcagcgccgcactttgtgctgaacaagagagcctgctggatgaactgctggcagatgatttagcacactgtcaaagcccgcaggggacgctgcagattgtgccaatgctggcgatgagtgatgcccgccgcgcggcgattatccgccgctggctggcagggcagaatgcaccgatgccttcccgcgacgcgttggtgaggatctggcaggaagtggcgctggcgcgggaagatgccagtccctgtttacgtttgggcgcgtttgaaatccgacgctatcagagccaactgtggtggattaaatccgtcaccgggcaaagcgaaaacattgtgccgtggcagacgtggcttcaaccgctggaattaccggcggggctgggaagtgtacagcttaatgcgggaggcgatattcgccctccgcgtgcagacgaagcggtcagcgtgcgtttcaaagcgccaggattgctgcatattgtcgggcgtaacggcggacgtaagctaaagaaaatctggcaagagctgggcgtgccgccgtggctacgtgacaccacgccactgctgttttatggcgaaacgctgattgcggcggcaggggtatttgtgacgcaagaaggtgtggctgaaggtgagaatggcgtaagttttgtctggcagaaaacgcttagttaagtgaaagccggataagacgcatcaaacgtcgcatccggcgaaagtcaatcaggattcgcttaccaccaccgtaccgatttccgggtggctaaagctggtaattttatccagacgcagctcgcgggtttcgccagcggcctcgacgaccaggtactccacatttttgcgggagactaaatcactggcttttgcctgcaatttttcgccatctttcagctcaagtgtcagcattaaatgatgctggcaggcgagctcaagattatcgtaatcatcacaattgattggttgatacgtatcattcattgacataatcgctcaccagtaagtttgccgcagcgtatgctgctttttccctgacagcctcagaaagggcgtcgtcggcagccatttcattcagcactttcaaaacgcagcccagcgcgtccggaacgtatcctaagtctccgctggcgatttccgcgtaccgcttgcgtattaactcacaatatttttccacatgccctcctgtcagcactctgacttaaccgtggatgcaagtctaagcctacgaagataaactctgtttcgcaaggtgactataccacactcatttctgcaatatcagcgccgcaactgcacgtattccgttacaatggcctcctgattcgaaaggagttttcttatggcgcttaaagcgacaatttataaagcgacggttaatgtggccgatctcgaccgcaaccagtttctcgatgcctctctgacgctggcgcgccatcctagtgaaacccaggagcgtatgatgctgcgcttgctggcgtggctgaaatatgctgatgaacgtctgcaatttacccgtggtttgtgtgccgatgatgagccggaagcgtggctgcgtaacgatcacctgggcattgatttgtggattgagctggggctgccggatgagcggcggattaagaaagcctgcacccaggccgcagaagtggcgctgtttacctataatagtcgggcggcgcaaatctggtggcagcaaaatcagagcaaatgtgtgcagtttgccaatctttccgtctggtatctggacgatgaacaactggcgaaagtaagcgcctttgccgatcgtaccatgacgctgcaggcaacgattcaggatggcgtgatctggttaagcgatgataagaataatctggaagtgaacttaaccgcctggcaacaacctagttgaactaaaccgcctggcaacaaccttcatgattgtgatttcccgacatgttgctattcccgatggtgagcttgagatcaccgccattcgtgcgcagggcgcgggcgggcagcatgttaataagaccagtacggctattcatctgcgttttgacattcgggcgtccagcctgccagagtattacaaagagcgtctgctcgccgccagccatcatttgatcagcagtgatggcgtgattgtcattaaggcacaggaataccgcagtcaggaactgaaccgcgaagcagctctggcccggctggtggctatgattaaagaattaacaacagaaaaaaaagcccgacgacccacgcggcccacccgtgcaagcaaagagcgcaggctggcaagcaaagcacaaaaaagtagcgtgaaggcgatgcgcggcaaagtgcgcagcggtcgggaataaaaagaaggaatggatggtgaaaaaagcgatagtgacagcgatggctgtaatcagcctctttactctgatgggatgtaataatcgggccgaagtcgatacgctttctccggcgcaggctgccgaactgaaaccgatgccgcaaagttggcgcggcgtgctgccgtgtgccgattgcgaaggaatcgaaacctctctgttcctcgaaaaagacggaacatgggtgatgaatgagcgttatctcggtgctcgtgaagaaccttcctccttcgcttcctacggtacatgggcgcgaaccgctgacaagctggtattaaccgacagcaaaggtgaaaagagttattatcgggcgaaaggcgatgcgctggagatgctcgatcgtgaaggcaatccgattgaaagccagttcaactatacgctggaagcggcacaatccagtttacctatgacgccgatgaccctgcggggcatgtatttttatatggctgatgcggcgaccttcactgattgcgcgaccggaaaacgtttcatggtagcgaataacgcagagctggagcgtagctacctggctgcgcgcggtcacagtgaaaaaccggtgttactgagtgtagaaggtcactttacgcttgagggtaatccggataccggtgcgccgactaaagtattggcacccgatacggcagggaaattttaccccaaccaggattgcagtagtttggggcagtaacccgtcttgagacagaaacaaacgcaaaacaggccagaaggatatatttcaacattttgaatttgcacgttttttgtaggccggataaggcgtttacgccgcatccggcaatggtgctcaacgcctgatgcgacgctggcgcgtcttatcatgcctacaacccccctcataccttaaggcggataaggcatttactttatcaccgggtcaaaccaacaaagcgacccgccttgatataaatcccaggcttcaggtgcccaacatactgtaactgcgtttctggcttaaacgcagagacatcaccaatacgcatatgcatcagatcggcagggctaatccagccgctttgcgccagtgtaagtggatgcccggctttggcaaaggcatccgtgacaaattcgctacaaaaccagctctttttgtctccttcgcccacactgcttaactgcgctttcgccaggccgctgacgcactgttggcgaaaatcctcggagaacggattcagactgcacatctggcgagtcaccataaagggaataaattcgacaatgccgcgatagttataaccgctatctttgattttattggcaaacgcggtgatatctgtggcttgttgcggggtaagatccgggactcgtaagacgaaaagcttatcactatgcttcatcgcttttttaagggaaacgatctggacgccagcgcctgtcgcttctgcaacgttattatcacccagaaagattgcaacgtgactcacagaggaagtgctgaagacgcggattccaaaactggttaccccaaggctactggagaacagcaaatcgccgggtttgagatcaggtgccgttatttcttttatactttgttcggtgaaagagctttgatgctggaatttgacagcccatgtttttgcctcggcatctactgctgtggcacttgggtctggctggctgatatcaacggtacaagcgctaagtaaaagaaagctggggagaaacaggcggcagtacgcctttggtttatccattttatacaatccatgtaaaaaaagggccctgaaattcaggaccctttctggcatcagcctttaatctgtttcaccagatattcgacgatgtcaccagtcttaattaactgtttctcgccgttgcgacgatatttatattcgatatcgtcgttgtcgaggttacggtcgcccagcacaatagtgtgcggaataccgatcagttccatatcagcaaacatcacgcccggacgctctttgcggtcatccagcagcacttcgataccttgtgcacgcagttcgctgtacagtttctcagcaagctcttgtacgcggaaggatttgtgcatgttcatcggcagaatcgccacctggaacggcgcgatagcgtcaggccatacgatgcctcgttcgtcgtagttctgctcaatcgccgcagctaccacacgcgttaccccgataccgtagcaacccatcgtcaggatttggttacggccatcttcaccctgtacggaggctttcagtgcttcggagtacttggtacccagctggaagatgtgaccaacttcgataccacgtttgatcagcagcctaccctggccatccgggcttggatcgccagccaccacgttacggatatctgcaacttccggggtagcgacatcgcgatcccagttgatgccgaagtagtgtttaccatcgatgttagcaccagcagcgaaatcactcatcgccgcaacggtacggtcaatcaccaccggaatcggcatgtttaccggacccagactacccggaccggctttaaccacggcacgaatttcttcttcggtcgcgaaagtcagcgggcttgcaacctgcggcagtttttctgctttaacttcgttcagctcgtgatcaccgcgcaccagcagcgcaacctgcgggaagctgctgccttcaaccgctttaaccagcagagtcttaaccgttttctcaatcggcagattgaactgttcaaccagttccgcgatggttttcgcgttcggcgtatcaaccagcgtcatttcctgggtagcagcagcgcgcggttctttcggcgcgatagcttctgccagttcaatgttcgctgcatagtcagaggtgtcggagaagaccacatcgtcttcaccgctctgcgccagcacctggaattcgtgagaggcgctgccgccgatagaaccggtgtcggcttgtacggcgcggaaatccagccccatgcggctgaagattttgctgtaggccgcatacattgcatcgtaggtttcctgcagggattcctgagaagtatggaaagagtaagcatctttcatcaggaattcgcgggaacgcatgacgccgaaacgcggacgcacttcgtcgcggaacttggtctggatctgatagaagttcagcggcagctgtttgtaagagctaagctcgttacgaatcaggtcagtgataacttcttcatgagttgggccgagtacgaacggacgctcgccacggtcaacaaaacgcagcagttccggaccgtactgttcccaacgaccactctcttgccacaaatcggctggctgaaccaccggcatgctcacctcgatcgcaccggcgttgttcatctcttcacgcacgatgttttcgacttttttcagaacgcgcacgccggtcggcagccaggtatataacccggaggccagcttgcggatcatcccggcgcgcagcatcagctgatggctgatcacctcggcgtcggcaggtgtctccttgagagtggagagcaggtattggctagtacgcatgttgttacggttccagttggaaggtagaacaggctcaaggcgagcctgggacaaaaaaaagtgatttagtttaccagtgcaaaagaaatgtcaaaagagaagggcgtgaatttaacgcggttccagcgcaaagacttcaaaacctgcgtcggtgacgcgccagcgaacgttaaaatcatgtagccagacggcataggttttgcccgtttcctcacctttacgataggccgggcgcgggtcctgcgccagtacttcgcggataaacagcgttaactgcggataacgcttctccagcgtcaaaagctgcttttcgacctctgcggtaaaactcaccgccatctctgcagctggcgcactttgcgcatagctggcactggcatcgggaaggctttcggcaaaggggagatacggtttgatatccactaccggcgtaccatcgaccagatccagactgccgagcttcagaatcacgctgtctttatggcaaacaacctctttcagctctaccaggctcatgccaattgggttagggcggaaagtagagcgtgttgcgaaaacccccattctggcgttaccgccgaggcgcggtggacgcacagtcggacgccagccgccttccatcgtttgatgaaagacgaaaaggatccataaatggctgaacgcttccaggccgcgaacggcgtcggcctggttgtagggagcaatgagatgcagttcgccgttggcgctttttaccagacctggctggcgcggaacggcgaacttttctttataggggctgcgaataacgcctatttgctcgaactggaaactgctcatttcgccgtaatgttaagcgcagaaccgatacatacagcctgacgatagcagcctggcgtaccgctggtgacttcgcagctatgcagtaatacagcattggctttcattttagaggcgttgatttgcatccgcttacgtgcggttggaatgctcggcggagagtcctgattagaggcctggcaagagtcgccactgacttcaccgagatcgcggaacggtttgccgactaattcttctgcattggtataaattcggaccggcgtggcgcgcggcgctttcggttttgcaggctccgctttcggctggggtgcagtgctttgaacgggttcgacaggggatctgcttaacatggaacagccgcttagcatgagtgctactaaacagatcggtaaagcacgcatagtatttcctcaatgtatgatcaaaacgtcaatattgaatcaggagcttgtaaaaatgacaagacgggcaagcgcccgtcctgaatgatattacaaattgtggaaacagcctaaaaattaccagcctttaacagctccgccgttaaacactttgtttgctgcttcgtaaacttcgtcagactgataagcctggacgaatttcttcacgttctcggcgtctttgttatcttcacgcgtcacgatcaggtttacgtacggggactctttatcttcaacaaagataccgtctttcgccggagtcaggccaatctggctggcataggtggtattgataactgccagagcgatttgcgcgtcgtccagagaacgcggcagttgcggtgcttccagttcaacaattttcagatttttggggttctcaacaacatcaagaacggtcggcagcaggccaacgccatctttcagtttgatcaagcccactttttgcagcagcagcagactacgaccaaggttagttgggtcgtttggcacggcaacctggctaccatcctgcagttcatccagacttttgattttcttggagtaaccagcaatcggataaacaaaagtgttgcctactgcgaccagtttgtagccacgatctttcagttgctgatcaaggtacggtttatgctggaaggcgttggcgtcgatatcgcctttgctcaatgcttcgtttggcagaacatagtcgttgaaggttaccagctcaacgtccaggccatatttgtctttcgcaactttctgcgcgacttctgcaacctgctgttcggcaccaacaatcacgccgactttaatgtggtttggatctttttcatcctgaccgcagcctaccagtgccagacttccgatcagggctcccactgccgcaaaggttttgaatttgaacgccataccttattccttcttcaattatttatgttgtgttgaacgttacttgcgagtgacagcccggacgatgcggtcgcctgcgaactgaattaaataaaccagaatgaccagcaataccagtaccgtattcatcaccgtcgcgttatagccgatgtagccatactgatagccaatctgacctaaaccaccggcaccgactgcaccacccatcgcggaataaccgaccagggtaatcagggtgatagttgccgcattcaccagacccggcagcgcttccggtaacagcaccttacggacgatctgcatcggcgtggcacccattgcgcgggaagcttcaattaacccggttgggatctccagcagagcgttctcgaccatacgggcaataaacggtgctgcaccaacggttaacggaacaatcgctgcctgcaaaccaatgcttgtaccgacaataacgcgggtaaacggaatcatccatacaagcaagataatgaacgggatggaacggaaaatgttcacaatcgcagaaacggtacgatacagcttcgcgttagcaataatttgccccggacgcgtgacataaagcagaacgccaaccggcagaccaatcacaaagccaaaaaaaccggatacgaaggtcattgccagcgtttcccatacgccacgaaccagcagccacatcatcggctcagacataacccagtacctctacttttacatggtgttcctgcagccaggcaatggcggcttgcgtatcttgttgtgtgccgtgcatttcagtcagcatgatgccgaacttaacgccaccggcgtaatccatctgcgcgctaataatgttgttgttgacgttgaaacgacgcgcggtttcagaaagcagtggggcatcgacgctttgaccggtaaactccagacgcagcatcggcacgcagtcagtaaatggctccgcttgcagacgttcctggtaatcttccgggatatccagatgcagggtgctctgaataaacttctgcgccagcggcgttttcggatggctgaacacttcacttaccgtgtcctgctcgatcagttctccattgctgatgaccgccacgcaatcacaaatgcgcttcacaacgtccatttcgtgggtgatcaacagaatcgtcaaccccagacggcggttgatgtctttcagcagttcgagaatagaacgtgtcgttgccgggtccagcgcgctggtggcttcatcacacagcaatactttgggattgctggctaacgcacgggcaattgccacacgttgtttctgcccaccggaaagattgctcgggtagctatcatgcttatcgccaagaccaaccaaactcagcaattccgtcacgcgacgtttgacctcgtctttcggtgtgttgtccagctccagcggcagagccacgttgccaaaaacagtacggctagagagcaggttaaaatgctggaaaatcataccaatctggcggcgagctttggtcaactcggattcactcagcgtggtcagttcctggccatcgaccagcacgctaccctcggttgggcgctccagcaggtttacacaacgtataagcgtactcttacccgcgccactggcaccgataacgccataaatttgtccagctggcacatgcaggctgacgttgttcaacgcctggatggtgcgggtgccctggtggaacactttggtgatattgctaagttttatcattgattatttattatcgtcattaagttagtcgtggcatctcgaatgcctgaaacgggcaacgccgtcaatgaaatggatgttaaggcatccagacgtctaaatcaatcaggtttatgcgaagagcactttcttgcaggtcgaaacatgcgatactagcgtcacatgccttattaaggagctataaaaggtggcgaagagcgtacccgcaatttttcttgaccgtgatggcaccattaatgtcgatcacggctatgtccatgagatcgacaactttgaatttatcgacggtgttattgacgccatgcgcgagctaaaaaaaatgggctttgcgctggtggtagtaaccaaccagtctggcattgctcgcggtaaatttaccgaagcacagtttgaaacgctgaccgagtggatggactggagcctggcggaccgagatgtcgatctggatggtatctattattgcccgcatcatccgcagggtagtgttgaagagtttcgccaggtctgcgattgccgcaaaccacatccggggatgcttttgagtgcacgcgattatttgcatattgatatggccgcttcttatatggtgggcgataaattagaagatatgcaggcagcggttgcggcgaacgtgggaacaaaagtgctggtgcgtacgggtaaacctattacgcctgaagcagaaaacgcggcggattgggtgttaaatagcctggcagacctgccgcaagcgataaaaaagcagcaaaaaccggcacaatgattaaaagatgagcggttgaaataaaaatgcatttttccgcttgtcttcctgagccgactccctataatgcgcctccatcgacacggcggatgtgaatcacttcacacaaacagccggttcggttgaagagaaaaatcctgaaattcagggttgactctgaaagaggaaagcgtaatatacgccacctcgcgacagtgagctgaaagccgcgtcgcaactgctctttaacaatttatcagacaatctgtgtgggcactcgaagatacggattcttaacgtcgcaagacgaaaaatgaataccaagtctcaagagtgaacacgtaattcattacaaagtttaattctttgagcatcaaacttttaaattgaagagtttgatcatggctcagattgaacgctggcggcaggcctaacacatgcaagtcgaacggtaacaggaagaagcttgcttctttgctgacgagtggcggacgggtgagtaatgtctgggaaactgcctgatggagggggataactactggaaacggtagctaataccgcataacgtcgcaagaccaaagagggggaccttcgggcctcttgccatcggatgtgcccagatgggattagctagtaggtggggtaacggctcacctaggcgacgatccctagctggtctgagaggatgaccagccacactggaactgagacacggtccagactcctacgggaggcagcagtggggaatattgcacaatgggcgcaagcctgatgcagccatgccgcgtgtatgaagaaggccttcgggttgtaaagtactttcagcggggaggaagggagtaaagttaatacctttgctcattgacgttacccgcagaagaagcaccggctaactccgtgccagcagccgcggtaatacggagggtgcaagcgttaatcggaattactgggcgtaaagcgcacgcaggcggtttgttaagtcagatgtgaaatccccgggctcaacctgggaactgcatctgatactggcaagcttgagtctcgtagaggggggtagaattccaggtgtagcggtgaaatgcgtagagatctggaggaataccggtggcgaaggcggccccctggacgaagactgacgctcaggtgcgaaagcgtggggagcaaacaggattagataccctggtagtccacgccgtaaacgatgtcgacttggaggttgtgcccttgaggcgtggcttccggagctaacgcgttaagtcgaccgcctggggagtacggccgcaaggttaaaactcaaatgaattgacgggggcccgcacaagcggtggagcatgtggtttaattcgatgcaacgcgaagaaccttacctggtcttgacatccacagaactttccagagatggattggtgccttcgggaactgtgagacaggtgctgcatggctgtcgtcagctcgtgttgtgaaatgttgggttaagtcccgcaacgagcgcaacccttatcttttgttgccagcggtccggccgggaactcaaaggagactgccagtgataaactggaggaaggtggggatgacgtcaagtcatcatggcccttacgaccagggctacacacgtgctacaatggcgcatacaaagagaagcgacctcgcgagagcaagcggacctcataaagtgcgtcgtagtccggattggagtctgcaactcgactccatgaagtcggaatcgctagtaatcgtggatcagaatgccacggtgaatacgttcccgggccttgtacacaccgcccgtcacaccatgggagtgggttgcaaaagaagtaggtagcttaaccttcgggagggcgcttaccactttgtgattcatgactggggtgaagtcgtaacaaggtaaccgtaggggaacctgcggttggatcacctccttaccttaaagaagcgtactttgcagtgctcacacagattgtctgatgaaaatgagcagtaaaacctctacaggcttgtagctcaggtggttagagcgcacccctgataagggtgaggtcggtggttcaagtccactcaggcctaccaaatttgcacggcaaatttgaagaggttttaactacatgttatggggctatagctcagctgggagagcgcctgctttgcacgcaggaggtctgcggttcgatcccgcatagctccaccatctctgtagtggttaaataaaaaatacttcagagtgtacctgcaaaggttcactgcgaagttttgctctttaaaaatctggatcaagctgaaaattgaaacactgaacaatgaaagttgttcgtgagtctctcaaattttcgcaacacgatgatggatcgcaagaaacatcttcgggttgtgaggttaagcgactaagcgtacacggtggatgccctggcagtcagaggcgatgaaggacgtgctaatctgcgataagcgtcggtaaggtgatatgaaccgttataaccggcgatttccgaatggggaaacccagtgtgtttcgacacactatcattaactgaatccataggttaatgaggcgaaccgggggaactgaaacatctaagtaccccgaggaaaagaaatcaaccgagattcccccagtagcggcgagcgaacggggaggagcccagagcctgaatcagtgtgtgtgttagtggaagcgtctggaaaggcgcgcgatacagggtgacagccccgtacacaaaaatgcacatgctgtgagctcgatgagtagggcgggacacgtggtatcctgtctgaatatgggggggaccatcctccaaggctaaatactcctgactgaccgatagtgaaccagtaccgtgagggaaaggcgaaaagaaccccggcgaggggagtgaaaaagaacctgaaaccgtgtacgtacaagcagtgggagcatgcttaggcgtgtgactgcgtaccttttgtataatgggtcagcgacttatattctgtagcaaggttaaccgaataggggagccgaagggaaaccgagtcttaactgggcgttaagttgcagggtatagacccgaaacccggtgatctagccatgggcaggttgaaggttgggtaacactaactggaggaccgaaccgactaatgttgaaaaattagcggatgacttgtggctgggggtgaaaggccaatcaaaccgggagatagctggttctccccgaaagctatttaggtagcgcctcgtgaactcatctccgggggtagagcactgtttcggcaagggggtcatcccgacttaccaacccgatgcaaactgcgaataccggagaatgttatcacgggagacacacggcgggtgctaacgtccgtcgtgaagagggaaacaacccagaccgccagctaaggtcccaaagtcatggttaagtgggaaacgatgtgggaaggcccagacagccaggatgttggcttagaagcagccatcatttaaagaaagcgtaatagctcactggtcgagtcggcctgcgcggaagatgtaacggggctaaaccatgcaccgaagctgcggcagcgacgcttatgcgttgttgggtaggggagcgttctgtaagcctgtgaaggtgtactgtgaggtatgctggaggtatcagaagtgcgaatgctgacataagtaacgataaagcgggtgaaaagcccgctcgccggaagaccaagggttcctgtccaacgttaatcggggcagggtgagtcgacccctaaggcgaggccgaaaggcgtagtcgatgggaaacaggttaatattcctgtacttggtgttactgcgaaggggggacggagaaggctatgttggccgggcgacggttgtcccggtttaagcgtgtaggctggttttccaggcaaatccggaaaatcaaggctgaggcgtgatgacgaggcactacggtgctgaagcaacaaatgccctgcttccaggaaaagcctctaagcatcaggtaacatcaaatcgtaccccaaaccgacacaggtggtcaggtagagaataccaaggcgcttgagagaactcgggtgaaggaactaggcaaaatggtgccgtaacttcgggagaaggcacgctgatatgtaggtgaagcgacttgctcgtggagctgaaatcagtcgaagataccagctggctgcaactgtttattaaaaacacagcactgtgcaaacacgaaagtggacgtatacggtgtgacgcctgcccggtgccggaaggttaattgatggggttagcgcaagcgaagctcttgatcgaagccccggtaaacggcggccgtaactataacggtcctaaggtagcgaaattccttgtcgggtaagttccgacctgcacgaatggcgtaatgatggccaggctgtctccacccgagactcagtgaaattgaactcgctgtgaagatgcagtgtacccgcggcaagacggaaagaccccgtgaacctttactatagcttgacactgaacattgagccttgatgtgtaggataggtgggaggctttgaagtgtggacgccagtctgcatggagccgaccttgaaataccaccctttaatgtttgatgttctaacgttgacccgtaatccgggttgcggacagtgtctggtgggtagtttgactggggcggtctcctcctaaagagtaacggaggagcacgaaggttggctaatcctggtcggacatcaggaggttagtgcaatggcataagccagcttgactgcgagcgtgacggcgcgagcaggtgcgaaagcaggtcatagtgatccggtggttctgaatggaagggccatcgctcaacggataaaaggtactccggggataacaggctgataccgcccaagagttcatatcgacggcggtgtttggcacctcgatgtcggctcatcacatcctggggctgaagtaggtcccaagggtatggctgttcgccatttaaagtggtacgcgagctgggtttagaacgtcgtgagacagttcggtccctatctgccgtgggcgctggagaactgaggggggctgctcctagtacgagaggaccggagtggacgcatcactggtgttcgggttgtcatgccaatggcactgcccggtagctaaatgcggaagagataagtgctgaaagcatctaagcacgaaacttgccccgagatgagttctccctgactccttgagagtcctgaaggaacgttgaagacgacgacgttgataggccgggtgtgtaagcgcagcgatgcgttgagctaaccggtactaatgaaccgtgaggcttaaccttacaacgccgaagctgttttggcggattgagagaagattttcagcctgatacagattaaatcagaacgcagaagcggtctgataaaacagaatttgcctggcggccgtagcgcggtggtcccacctgaccccatgccgaactcagaagtgaaacgccgtagcgccgatggtagtgtggggtctccccatgcgagagtagggaactgccaggcatcaaattaagcagtaagccggtcataaaaccggtggttgtaaaagaattcggtggagcggtagttcagtcggttagaatacctgcctgtcacgcagggggtcgcgggttcgagtcccgtccgttccgccacttattaagaagcctcgagttaacgctcgaggttttttttcgtctgtatatctattattgccagaatcgcaaaaatcctctgcattttacgctctttttcctcaacagtctgaagcccataatcacctcagttaacgaaaatagcattaaaagaggcatattatggctatccctgcatttggtttaggtactttccgtctgaaagacgacgttgttattagttctgtgataacggcgcttgaacttggttatcgcgcaattgataccgcacaaatctatgataacgaagccgcagtaggtcaggcgattgcagaaagtggcgtgccacgtcatgaactctacatcaccactaaaatctggattgaaaatctcagcaaagacaaattgatcccaagtctgaaagagagcctgcaaaaattgcgtaccgattatgttgatctgacgctaatccactggccgagtccagacgatgaagtctctgttgaagagtttatgcaggcgctgctggaagccaaaaaacaagggctgacgcgtgagatcggtatttccaacttcacgatcccgttgatggaaaaagcgattgctgctgttggtgctgaaaacatcgctactaaccagattgaactctctccttatctgcaaaaccgtaaagtggttgcctgggctaaacagcacggcatccatattacttcctatatgacgctggcgtatggtaaggccctgaaagatgaggttattgctcgtatcgcagctaaacacaatgcgactccggcacaagtgattctggcgtgggctatgggggaaggttacagtgtaattccttcttctactaaacgtaaaaacctggaaagtaatcttaaggcacaaaatttacagcttgatgccgaagataaaaaagcgatcgccgcactggattgcaacgaccgcctggttagcccggaaggtctggctcctgaatgggattaagcctctctgacagctcctccgggagctgtttttacatgctcgctaaggaaatcgataaaagcccggatgcgcgtacttaccgcacggtcgctgtaatagacggcactgaatggcatttccactggcaacactttatctgccattaactccaccaattctccgcgagcgatttctttgtcgatcatgtagtcggacaaacacgcaatcccgttgccactcaggcaaagctgtttcagtgtttccccactattggaactcaaaccgtacttcacctcatgtaattgtccatcgctacgggctatcggccaggtattgagggaagcgggttcagtgaatcccaggcaaatatgttgctttaaatcgtcgatcgtttctggcttcccgtagcgggaaatataatcgggggaggcgataatttttcgataactgttaaataacggcctggcacgtaagctggaatccgttaacgtaccagcgcgtatcgcgacatccacttttctttcgatcaaattaataatcgtttcggaggagactaggctcaaagtgacttccggatagcgttcacggaaaggcttaattaacggcatcagaaagtgcagcaccactggagttgcggcatcgatccgtaacagtccacgcggtgtattacgcgtctccataatttcactttctgccgctgccatctcctgcaaaatactctgtacgcgacgaaaataacgctcgccttcttccgtcaggctaagttgtcgcgtggtccgattaagcaggctaacgccaagtttcatctccagctttttcaccgcccggcttaccgcactgtttgcttgccctaattgttccgctgcccggctaaagctgccgctttcgacgacgctaacaaaaatggcgagttcttcgctcgtggctttcatttttgctcctgttgcaaaatagaagagatattttgaatttatttgtcattaaaccatcaggatgcgtgatatgtcatgcgatttaatgttctccataatgagcaaaattctgaccggtgtaagcacttgcttacataacaatatacaattgctcgttgaaagagtgagctaaaatccctataacagtagaaccctcccgagtgcggaagggttgacgtaatagaggtttcaaagtcaaaagtgcgaaaaaacacctatgccatgcgctatgttgccggacaacctgcggaaaggatcttaccgccggggtcttttgcgagcatcggccaggcattaccacctggggaaccgttaagtaccgaagagcgtattcggatcctggtgtggaacatatacaaacagcaacgcgctgaatggttgagcgtattaaagaactacggcaaagatgcacatctggtgttattgcaggaagcgcagacaacgccagagttagtacagtttgcgaccgctaactatcttgccgccgatcaggtacccgctttcgtgctgccacaacatccttctggcgtaatgacccttagcgcggcacatccagtgtattgctgcccgttacgtgaacgagaacccattttgcgtctggcgaagagcgcactggtgacggtctatccattacctgacacccgcctgttgatggtggttaatatacacgccgtcaacttcagtctgggcgtggatgtctatagtaagcagttacttcctattggcgatcagatagctcaccacagcggcccggtcattatggcgggagatttcaatgcctggagccgtagaaggatgaacgcgttatatcgctttgcgcgggaaatgagcctgcgccaggtgcgttttaccgatgatcagcgccgtcgggcgtttggtcgcccgctcgattttgttttctaccgtggtctgaacgtcagtgaagcttctgtactggttacgcgcgcttccgatcacaatccgctactcgttgaattcagtcccggcaagcctgataaataaggtatgagtggtctgccacagggcagaccaacgtttggcgctgcgcaaaacgtgagcgcggtggtggcgtatgacttatctgcccacatgctggatgtcgtggcacaagctgccgaagcccggcaactgaaaaatatcaccacccgccagggatatgccgaaagtctgccatttgccgataacgcatttgatattgttatcagccgttattctgcccatcactggcatgatgttggtgcagcactgcgagaagtgaataggatattgaaacctggcggtaggctgattgtgatggacgtaatgtctccgggtcacccagtgcgcgacatctggttacagacggtagaagcattacgcgatacctctcacgtacgaaactacgccagcggtgagtggttgacgttaatcaatgaagccaatctgatagttgataatttaattacagataagttaccgctggaattttctagttgggtcgcgagaatgcgtacgccagaagcgttagtagacgctattcgcatttaccaacagagcgcaagcacagaggtgagaacgtattttgccttgcagaatgatggctttttcaccagtgatatcatcatggtagatgcacataaagcggcataaataaaaaaggcaccgggggaatcggtgcctttttattatctggtttgtcaggaatctggcatgttgttgtttttcacaaacaacgtcagcttatcgcctggttgcagattcgcagtgtcgctgttccagcgcatcacatctttgatgttcacgccgtggcgtttagcaatgctactaaggctatcgcctttgcgcacacgatacgtaatgctatcgctgttgtttgccagtcgctgtgcgctactgcctgcaccaatcgtcaaactttggcctggcttcagcttagatccgcgcagtttgttccactgctgcaaatctttggtgcttacgccgagacgactagcgatactactaagcgtgtcgccagagcgtacggtgtaaacacggctgttaagcggcgtattgtcggcaaccagcgtgctctgtacagcagcaatttcgccactagccagagattcacgcagttgatctgcatgcttctttggcaccatcacgtactgcgggccacttgcgcccagcgtggagccttttacgccagcgttgaatgtcttcagcttgctgacggaaatccccgccatatctgctaccttcgccatttcaaccgggctgctcaggtgcacacgcgccagagcacggctttcatcggtcgttggcagacgtacgccataacgcttgctgtttttgagaatatcactcaatgccagcattttaggcacgtactgcttcgtttcctgcggcaacggtaagctccagaagtccgtggatttcccacgcgctttgttcgttttaattgccttcatgacccgaccttcgccgctgttataagccgctacggtcagaagccagtcgccgtcaaacattttgttcagacgctgcatcatattcagcgcggcagttgcactagcaacaacatcgcgacgcgcgtcataattgcgggtctgtttcaaaccataattgcgccccgtgctcggaatgatctgccagatgcctgcggcattggcgccagacgttgcgtgaggatcaaaagcgctctccactatgggtagtagtaccagttccataggcatgttacgttttttaacttgccctgctatccagtacatatacggctctgcccgtaaagttacatcgtggagatagctcttattgcgtaaatatttctgtttctgttcgcgaatccggtcattttccggaattcccatctttagctcgtcgccaatgaaagcccacaagtcaccatctggcgcgatagacgtcccatcgtccatccatcgtgcctgacttgtaaactttgctgcttccccttgaccagctgcagaaaggctctgtgcgtgctgttgaacgttgccggtactctggcaacccacgagcaggacagaggcgagtaatatcgcttttgccttcatgtgtgtgtcaatagttgcttaaaagacgaccgatcataacggcgaacggagccgatgacaagaaagttttatcagaacctatctttcttactccttaaccatgcaaaacgctcttcaggttgttgcaataatgtttcttcattaattacattaattaaatcaatatcttccgttcttaaaaaaacattaatttgccgctcatttttcagaattacgggtagtgttatttgattttttgcccgtaactccttaactttacgataataatcatttatggacaaatcgtgcggaagaatactcaaagcaaacttcatattacttaaggtatattcatgagcacaacataccaatgtatcgtcaggtaacgcacttaactttttaagactttgatacatttgacttgctgtcccttcaaacaaccgaccacacccaccagaaaacagtgtgtcgccgcaaaatagataaggtttactgaagtaacagatatgtcctaaagtgtgacccggcgtagcaattacactaaattcatgccccaaaacgaaggcagtttcgccatctttgactacctgtgttgttcccttatcttgtgtctcttgtggaccatacaccacaatttgtggaaacttttccaccagttcttttacgccgccaacgtgatcgtggtgatggtgggtgagaaatatggcctccggttgccagttattggcggcaatggcgtttaatactggctctgcgtctccgggatcgacaatcaggcagcgacctgcttcatcattcaaaacccagatgtaattgtcatcaaaggcgggaatactgttaagattcatagattacctctcagtgtgaaacggaaggttgtgatgaaaccggcaagagtccctcaaactgtcgtggctcctgattgctggggcgatttgccctggggaaagctttatcgcaaggcgctggagcgccagctcaacccgtggttcactaaaatgtatggttttcatctgcttaagattggcaatttaagcgcagaaatcaattgcgaagcgtgcgcggtttctcatcaagtgaatgtttctgcgcaaggaatgcccgtccaggtacaggcggacccacttcatcttccttttgccgataaatccgttgatgtttgtctactggcacatacattgccgtggtgcaccgatccgcatcgtttattgcgtgaagccgatcgggtattgattgatgatggctggctggtcattagtggcttcaatcccatcagttttatgggattacgcaaacttgtgccggtattgcgcaaaaccagcccctataacagccggatgtttactctgatgcggcagctggactggctctctttgttgaattttgaagtgctacacgccagccgtttccacgttctcccgtggaacaaacacggaggaaaactattgaatgcgcatattcctgcgcttggttgcttacaacttattgttgcccggaaacggactattcctttaacgctaaatccgatgaaacagagtaaaaacaagccacgaattcgccaggcggttggagccacccggcaatgtcgtaaaccacaggcttaaacttcaacttggtagcctgtatcttccagtgtgggattcatcgccgcggcacgagccagttcatcacagcgttcgttttccgggtgtccggcatggcctttaacccattcccatttgatttgatgctgccccaatgcagcatcaagacgttgccagagatcgacattttttactggttttttgtctgcggttttccagccacgttttttccagttatggatccactgggtgataccctggcggacatactggctgtcggtactcaaaatgacttcgcaatgttcttttaacgcctccagcgcgacaatagcggccatcaactccatacggttgttggtggtgcgggtgtagccagcgctaaaggttttctcgcgtccgcgatagcgtaaaatagcgccgtaacccccaggtcctggattgcccagacagctaccatcggtgaaaatttctacctgtttaagcatctctggtagacttcctgtaattgaatcgaactgtaaaacgacaagtctgacataaatgaccgctatgagcactgcaattacacgccagatcgttctcgataccgaaaccaccggtatgaaccagattggtgcgcactatgaaggccacaagatcattgagattggtgccgttgaagtggtgaaccgtcgcctgacgggcaataacttccatgtttatctcaaacccgatcggctggtggatccggaagcctttggcgtacatggtattgccgatgaatttttgctcgataagcccacgtttgccgaagtagccgatgagttcatggactatattcgcggcgcggagttggtgatccataacgcagcgttcgatatcggctttatggactacgagtttagcttgcttaagcgcgatattccgaagaccaatactttctgtaaggtcaccgatagccttgcggtggcgaggaaaatgtttcccggtaagcgcaacagcctcgatgcgttatgtgctcgctacgaaatagataacagtaaacgaacgctgcacggggcattactcgatgcccagatccttgcggaagtttatctggcgatgaccggtggtcaaacgagcatggcttttgcgatggaaggagagacacaacagcaacaaggtgaagcaacaattcagcgcattgtacgtcaggcaagtaagttacgcgttgtttttgcgacagatgaagagattgcagctcatgaagcccgtctcgatctggtgcagaagaaaggcggaagttgcctctggcgagcataaatacctgtgaaaggcgctaaaaatagcgacttgggcgatttttgcagcaaacgattcaaaagatgagaaaaaccgttgacgaaggtcgaggcaatccgtaatattcgcctcgttcccaacggaacacaacgcggagcggtagttcagtcggttagaatacctgcctgtcacgcagggggtcgcgggttcgagtcccgtccgttccgccactattcactcatgaaaatgagttcagagagccgcaagatttttaattttgcggtttttttgtatttgaattccaccatttctctgttcaatgattttactctggcgtaggtgcgtgattctcgcttgttgtctcattcattaaaattcaataatgatatcgaaccattcagcttaaatatatttctagagaataaatttatattgattaaatgaatgtatatttcaaattgattttgtttgttattatttaagtgaggtatataattagagtccgttatcaatgctaaatattctaatcattatgacaggcgagggagtgtccaattatgaatagtaaaaagctttgttgcatatgtgtgttattcagcctgcttgcaggatgtgcctctgaatcttctattgatgaaaagaagaaaaaagctcaagtcacacaaagtaatattaataaaaacactccccagcaactgacagacaaagatttattcggtaatgaaaccactctggccgtatccgaagaggatattcaagctgcgcttgatggagatgagttccgcgttccccttaattctcctgtaatacttgttcaatccggcaaccgcgcaccggaaaccattatgcaggaggagatgcgaaaatattatactgtttccacattctctggtatcccggacaggcaaaagcctctgacttgtaacaaaaacaaagataaaaatgagaacgaggatgttgccagtgctgagaatatgaactggatgcaggcactgcgttttgtggctgcaaaaggacatcagaaagcgattattgtttaccaggatatgttgcagacaggaaaatatgactctgcgctgaaaagtacagtatggtccgactataaaaatgacaaactcactgacgctatctccctgcgctacctggtacgtttcacgctggtggatgtggcaacaggtgagtgggctacctggagcccggtgaattatgaatataaagtgcttccaccattgcccgacaagaatgaagccagtacgactgatatgacagagcagcaaatcatgcaacttaagcaaaagacctataaagcgatggtaaaagatttggttaaccgctatcaataataaattatatctgccgccaggaatttctggcggcaataatacaaaattctttgcataagaaatttttcttgacaaagacagtgcaagaaaggacatggaatccggagttaaaaactgtttgttttagaatatttaattatttaactgctgaatcttccttgcgagaaatatatccattattacatttcatgccatttttaatatagattgctcctgggaaaattcccgtattattaccgcaggggtgataattagtattgacatatcctgtgacaaaaggagctattaaaggtgctattacgatagctattagtaaaaatataagagttagctgtattgttatgtctgtggcgaaattgactaccttcgtttttttgattaagaatgattttattatcgtaagtaaaattacatgaatatttaaaaaggaaaacgacatgaaaccgaagcacagaatcaacattctccaatcataaaatatttccgtggagcattttattattgaatatagaggtttaactccggtaaaaaacaaagaagcattgaatgcagggaaaaataatatggccataaaaaacatcgaaagaaactcttttaatttaacatgtaaacgcatggttaatcctcatatcacgggtggagtgttaagaacatacataaatggagtcatgttttcccttttccatttatcaagttcctgttgccgttttagtccatctctaattgcatattttaatttttcacttaaatggcattgagcatcgatttcatttaaaacaactgtacacactatccctgtcagtaaaattgctcctccgacaagaattactggaaagccaaagctaacacaggcaaaagaagccagacttccaatagcggttgcaacaccaccggctataactgctttggccacatccatactaaaatcgccaagaaaattaaccagatctcgctcactactcataataaattctatggttctgctgatttaaccgcagagaagttcgccacagcaatccgaaaccactggcacgtggagaataagctgcacaggcgtctggacgtggtaatgaatgaagacgactacaaaataagaagaggaaacgcagcagaattatttagtgggatacggcacattgctattaatattttgacgaatgagaaggtattcaaggcagggttaagacgtaagatgcgaaaagcagccatggacagaaactacctggcgagtgtccttgcggggagcgggcttagctaataataccccgactctccccgtccttaaacacaacccccactcaccacaacctaaactcatccgcatcctgccatgccggaaacttttctctatattcccgcaatgctgccatgctcagctccgcatcaatgcgcgttgcctgatgcgcgtcggcagtagcgataatctctccttgcggattaatcacccggctgtcaccgcgataatggcagccgttgccatcgctgccgacgcgattgcatcccgccacatacgcctgattctcaatcgcgcgggccgtcagcaatgcctgccagtgcagagagcgcggagcaggccagttggcgacgtacagggcgaggtcataatcgttgagattgcggctccacacaggaaaacgtaagtcgtagcacaccagcggcaaaatacgccagccgcgccattccacaatcactcgcgcattgcccgctttataatgtagatgctcatctgccatgcggaacagatgacgcttatcataaaaatgtaccgtgccgcccggctcaaccagcaaaaagcggttaacgctaccagactccgtttgtaatgcaacactgcctgcaatcagcgcattgcactgctgcgccttagctgtcatccagttcactacgtcatcttgtgctaggctgctagctgccgcttccatggcaaagccgctggtaaacatctccggtagaacgatcacatcgcgcccggtaataccttccagttgacgatcaaaatgacgcaggttggcaggaccatccatccacaccagtggttgctgcaaaagcgtaatcttcaaaccaggcacggtgtacaactcctttatgcgaagggttttataactttaacaccttatcaggcagttgccttagcgcagaataaattgataacaaatgctgatattggaaatatctgatttgcaaattatcgtgttatcgccaggctttaggaggttaataacatgggcaggataagcagcggaggaatgatgtttaaggcaataacgacagtcgccgctctggtcatcgccaccagtgcaatggcgcaggatgatttaaccattagcagccttgcaaagggcgaaaccaccaaagctgcatttaatcagatggtacaagggcataagctgcctgcctgggtgatgaaaggcggtacttatactcccgcacaaaccgtaacgttgggagatgagacgtatcaggtgatgagcgcgtgcaaaccgcatgactgtggcagccaacgtatcgctgtgatgtggtccgagaaatctaatcagatgacggggctgttcagcactattgatgagaaaacgagccaagagaaactcacctggctgaatgtgaacgatgcgcttagcattgatggtaaaacggtgttgttcgcggcgttgaccggcagcctggaaaaccatccggatggctttaattttaaataattagcggataaagaaacggagcctttcggctccgttattcatttacgcggcttcaactttccgcactttctccggcaactttaccggcttcgtcgccagctcttccggatcaaagtcatcaacgttaatactgcgcagacggctttcttcagctttcaccagaatagcggcttcatctttatcaatcagccccttcaccagcgcgttgtgcgccagttcatccagacgggtaaacggcaggtttttacccagctctttacagatccgctgatgaattgggtcggcggcaatcacatccaccagcgcctcttccagcaagccaaccggattatgctcgctcggcgtcaggtactgaccgcgaccaatgcgggaacgggtggcgttcggcacttgtaaaatcttcgccactttatgatccagcttgtcagaaggtgccagataatgacgtccggtcgggaagatcaccacattcagcagcccggcaaccacgcggttcgggaagttttgcagtaaatcatccatcgcctgttcagcctgatacagcgcatcttgtacgccccagtgcaccagcggcaggtcggcttcattacggccttcgtcgtcataacgcttcagcacggcagaggcgaggtagagctggcttaaaatatcccccagacgggcgctgatgcgctcgcgacgtttcaggctgccgcccagcactgccatgctgacatcagaaagcagggcgaggttggcgctcaggcggttcaggtgctgatagtagcgtttagtggcatcgccggttggcgtgctgctggttaaaccgcgcgtcaggcccagccagaagctgcgaactttgttgctaccgacgtgaccgatatgtttgaacaacagtttatcgaacgcgttgacgtcattgttcttcgccgcttccatctcttccagcacgtacggatggcaacgaatcgctccttgtccgaagatcatcatgctgcgggtcagaatgttagccccttcaacggtgatggcaatcggtgcgccctggtaagcacgcgccaggaagttgctttgcccgagcataatgcctttaccgccggtaatatccatcgcatcaataatgttctgctgcccgcggtgggtacagtgatacttaacgatagcgctcagcacggcaggtttttcgccgagcataatgccgtaggtaatcaggcttgccgcagcatccatcacgtaggcattaccggcaatacgcgccagcggctcttcaatcccttccatcttaccaatagagattttgaactgacggcgaatgtgagcatacgcgccggttgccagcgctacgcttttcacgccgccggtactgttggaaggcagggtgatgccgcggcctacgctgaggcactccaccagcatccgccagccttgcccggccattttcggcccgccgatgatgtaatcgatcggcacgaagacatctttaccgcgcgtcggtccgttctggaacggtacgttcagcgggaagtggcgacgaccaatttccacgcccggcgtggtggttgggatcagcgcacaggtaatgcctaaatcttctgcaccgccgagtaatttttccgggtcggagagtttaaacgccagcccaagcacggtcgcaatcggtgccagcgtaatgtagcgtttgttccaggtcagacgcatccccagcacctgctggccctgccattcgcccatgcagacaatcccggtgtccggaatcgcgcccgcatcggaacccgcttccgggctggtcagtgcaaagcaggggatctcctgaccacgcgccagacgcggcagatagtgatctttctgctcgtcagtgccgtaatgttgcaacagttcgcccgggcctaaactgtttggcacgccgacggtaatcgccaggatcccgctcacgccggagagtttttgcagcacgcgagactgggcataagcgctgaactccagcccgccgtactcttttttgatgatcatcgcgaagaaacgatgctctttaaggtacgcccacaactccggcggcagatccgccagctcatgggtgatctggaaatcattcgccatccggcaggcttcttctaccgggccgtcgagaaacgcttgctcttcggcggtcaggcgcggctgcggatagttatgcagctttttccagtccggcttgccctggaacaagtcgccctcccaccaggtggtgcccgcatcaatcgcttctttctcagtgcggctcatcggcggcatcaccttacggaaaccgcgaaataccggcgcggaaatcatgctcttacgcataggcgcaaagttaaatggcacgaggataatggccagaggcaccagtacccacgcgctccacagaccagcaacgccgagggcggctgtccaggcgagcaaaatcagactgctgataaataagctcacgcggtgatagaacaacgcgccgagcaggacaaccgtagcgagaatactcaaaatcatcataacgaaaagccccttacttgtaggaggtctgaccacttgtgatgatatggttgtagtggatgtaaaaacatttagcaatatgtttacaatataattacaacaaagctcacattgttgctgtttttatccgcacttcaggtcaaaaagtcctggtcatagcacctgcccgtacttctcgcttttggcggtatccggtacactgcattttgtctattacatttatgctgaaggatatcctcatgtaccaggatcttattcgtaacgaactgaacgaagcggcggaaacgctggctaactttttaaaagatgacgccaatattcacgccattcagcgcgcggcggtcctgttagcagacagctttaaagccggtggcaaagtgctttcctgcggcaacggcggttcccattgcgacgctatgcactttgccgaagagttgaccggtcgctaccgtgaaaaccgtccgggctacccggcgattgctatttctgacgttagtcatatttcctgcgtcggtaatgatttcggtttcaatgatattttctcccgctacgttgaagcggtaggtcgcgaaggcgatgtactgctggggatctccacctccggtaactctgcaaacgtgatcaaagcgatcgcagcggcgcgtgagaagggaatgaaagtgatcaccctgaccggtaaagacggcggcaaaatggctggcacggcggatatcgaaattcgcgtaccgcactttggttatgccgaccgcattcaggagattcacattaaagtgatccatatcctgatccagttgattgaaaaagagatggttaagtaagtctggcgtaggccggataagacgtttacgccgcatccggcatttgtgcgctgatgcctgatgcgacgctgacgcgtcttatcatgcctacaaatctgtacgcgaaccgtaggccgaataatgcgttcacgccgcatccgacctgaaaattcttaaatcaatcttcgccgggggccatgcgctcccgctgttgtggaggttacccatgtgcgaattgctcgggatgagcgccaacgtccctaccgatatctgctttagtttcaccgggcttgtacagcgtggtggtggaaccgggccacataaagatggctggggcattaccttttacgaaggtaaaggctgtcgcacatttaaagatccacaacccagctttaattcccccatcgccaaacttgtccaggactacccgataaaatcctgtagcgtggtggctcatattcgccaggctaatcggggcgaggtggcgctggaaaatactcacccatttacccgcgagttatgggggcgtaactggacttatgcccataacggacaactgacgggctacaaaagtctggaaaccggcaacttccgcccggtaggcgaaaccgacagcgaaaaagccttctgctggctcctgcataaattaacgcagcgttacccgcgcacaccgggcaacatggcggcggtatttaaatatatcgccagtctggcggatgaactgcggcagaagggcgttttcaacatgctgcttagcgacgggcgctatgtaatggcgtattgcagcactaatttacactggatcacccgccgcgcgccgtttggcgtggcaacgttgctggatcaggatgtggaaatcgacttcagcagccagaccacaccgaatgatgtggtcacggtgattgcaacacagccgctgacgggcaatgaaacctggcaaaagattatgccaggcgaatggcgcttattttgcctcggggagcgtgtagtttgattattttgcctcggggagcgtgtagttacttgccagttgtggctgcacaacttcgtggcttaacggcttgctgaccacgtaacgaccattgaccacagaaacggttggtggcttacgggtttgctcaaagtagtcgtaacccggcttcagttgctcccagaagtccttaaagttggaatatttatggcgcttcatattggcgtcggtcatgcggaacgggtaaatactcacttgcacgctcggctgaccaaacaccagcgcaccagtaacgaactggaatatctcatcaataccctgattggtcattgcgtagcagccgatggaaacacaatcgccgtggatcatcaggtatttcccttcataaccatgcgcacggtcataggcattggggaaaccaatattaatcgctttgtagtaacggctgtctggttttaactgattacgctggacgctataaaacccttccgggcttttgaaatcgccctgacgctgttttggccctaagccgccggaatatttacagattttatagctgtcgagcagttgatattgctcgcccattttgacgtagagatcgagcgtacgttcttccttgaagatctggatgtagacaggggatcccatcaactgctgcttatactctttgctcacaggcgtggtagagctactgctgcccagcaaaccggcaaaactaacgcacgggatcaacaacatcgcaagaattaatgcgattttacgcatactgcttattccttgataaaacggttacacacgccaggacggcaaaatggatcccaaatcggaatagtctggatttggaaggctcacattatcaccaaaagagttttacgcaagcctgtcggcgcagggtttacaaatttcatcggaagcgggctttacccaaagagcgccgcgtgagttccagttctctcaaatcgtaaaagtttatcggtaagtttgtaaatcaggatccagtccggttcgacatgagcatcgcgataacctttccaactaccttgcagcgggtggtctttataaacagctggaagcggtaaagtattattgataagaagcgtcataagatatttcaatttattcatatccttatgacgcttttgtgcaagttttacatccttactatattgtccgctgtattcaatatccctttgaatcatatttaaattcctaatttatcaaataaatcatcggcgtctttggccttatgaacatcaatgccagcttcgctgtttttgatactttgaatggttaattgattaggctcgcgtaaatcaaacggcaatgccttttcacgcgcgacctttgtgagggttatgcgaaccaggtcagagatggtcagccccatcccggccagtacgtccgctgcctgattcttcagatcttcatcgattcgggcgcgaacaaacgcgttagcagccattggggtatctcctgtgctgtatatttattcagcttgaattgtagctcaaatgagcaacagcgacaatccatgagtaatttaataaacggatgtttttacataattaactgaaatatatatgttaattttataataatggtttattaagtttgttcagaaacgatccgggatacactgcaacattaaagcatgaccagccattattgagtatgtccttgccgagcattccatcctttgtattgagcggattactgttgatttgtttgccgttttctagttttgccagcgccaccacaagtcatatctctttcagctacgccgcccgccagcggatgcaaaaccgtgcgcgtttattaaaacagtaccaaactcatctgaaaaagcaggccagctatattgtggaaggcaatgccgaaagcaaaagggcgctacgccagcacaaccgggagcagataaaacagcatccagaatggtttcctgctccgctcaaggcgagtgacagacgctggcaggcgctggcggaaaacaaccactttttaagcagcgaccatctgcataacattaccgaagtggcgattcaccgcctggagcagcagcttggcaagccttacgtctggggcggtacgcggcctgataaaggctttgactgtagcgggttggttttttatgcctacaacaagatccttgaggctaagctcccgcgcacggccaatgagatgtaccactatcgccgggcaacgattgtggcgaacaacgacctgcgccggggagatttgctgtttttccatatccacagccgcgagatagccgatcatatgggcgtgtatttgggcgatgggcaatttatcgagagcccacgtaccggcgaaaccattcggataagccgattagccgaacctttctggcaggaccattttttgggcgcgcgcaggattttgacggaagagacgattttgtaagacggataaggcgtttacgccgcatccggcagttgtacgcaggtgcctgatgcgacgctggcgcgtcttatcatgcctacgagcccgcgaatatttgcgagccgctttcccgatataaaacaacctcattgccaacctttccttttcttcttaccgttgagaaaaaggagtcgccatgtctgaatatcgtcgttattacatcaaggggggaacatggtttttcacggtgaatttacgaaatcgtcgaagccaacttttgaccacccagtaccagatgctccgtcacgccattattaaagttaagcgagacaggccttttgaaatcaacgcctgggtcgttttgccagagcatatgcactgtatctggacattacctgaaggcgatgatgatttttccagccgctggcgggaaattaaaaagcaatttacccatgcttgtggattgaaaaatatctggcaaccacgtttttgggagcacgccatccgcaataccaaagattataggcatcatgttgattatatttatataaatccagtaaagcatggttgggtaaagcaagtgagtgattggccattcagtacgttccatcgcgatgtcgcgcgagggttatatcccatcgattgggcgggggacgtaacggattttagtgccggggagcgtatcattagttaattgtgcgcagatgcctgatgcgacgctagcgcgtcttatcatgcctacaaacttgtgccggatcggtaggccggataaggcgtttatgccgcatccggcagttatgcgcagatgcctgatgcgacgctggcgcgtcttatcatgcctacaaacttgtgcctgaacggtaggacggataaggcgttcacgccgcatccggcagttgtgcaccaatgctggatacttacatcaacgcccccataatcttcaactccagctcatccggcacttcgttatacgacagcacatgcagccccggcgcaaacaaccttgcataacgcgccagcaaagggcgcagctgcggtggcaccagcagcaccgggtctttccccgccgctttcatctgctctttcacctgtggcatcgtactctggaactggttgagcatattcggatcgaccggcacgctgtcgagcatcactttcccgccctgttgcgcctgattcaccacgttggtcagcagattttccagctcattattcagcgtatacaccgtcagctcctgcttgcgaacgaacggatgggtaatgctgcgccgcaatgccaggcgcacatcggccgccagcagaatatgatctttcgtcaccgtgctactggcgaccagcacggtggcgatggtgacgatatcgcgcagggaaacgccttcggtcagcagcgcccggtacactttcagcaactggctgtaattgagcgccgcgctcaaatcttccgccagacgcggtgccgtcgacgataaacggttatgcaactgcgtaatatcatcatagttaaacaaatcaggaatatagctgcgcacaatcttatttacatgggtagcgatcacgctggcgctgtcgatcacctgataccccatattcagcgccttcgctttctgcgccgcctggatccaggtgaccggcatcccgtacgccgggtcgttcccctgcacgccgtcaatctcgccgtaggtttcgctggagggcagggccatcagtttatccgccggaatatccgcttcatcagcctttatgccgttgatgaaaatggcgtactgactgggcttaaggcggaagttttcccgaatgcggatctccggcagcagcacgccgttgccgtcagaaatcacctgccgcacgccgcgaatccgctgggtgagcgggttaccctgtgctttgtccaccagcgccaccagtttgtaaccgaggcttaaactgataggctcgatcagcggaatggtttcccaactgacctgctgctcgctggtttcggtgatggtgcgggtcagcgtttcgaggcttttctcttccgcctccgccgccagcggctgtttgctcatccgccagccggtaaaaccaagcagggcgctgaacagcaaaaacggcaggtgcggcattcccggtaccaccgccagcacgaacataatcccggtggcggtgtagagcaccgacgggcttgccagcagctggttacgcacgtcatgggcgatatcgccgttgtcgctgacgcgggtgacgataatcgccgccgcggtggagagcagcagggaagggatctgcgccaccaggccgtcgccgatggtcatcagcacatactgctggaaggcagcatcggcgctcaggttgtatttgaagatcccgatacagacgccgccgatcaggttgatcgccagaatcatcatcccggcgatggcgtccccgcgcacaaacttcgatgccccgtccatcgcgccgtagaaatcggcctcgctggcaacatctttacgccgggtttgcgcctgcgcctggttgatcaatccggcgttaagatcggcgtcaatcgccatctgtttgccgggcatcgcgtctaaggtaaagcgggcagaaacctcggaaatacgctcggcccctttggtgacgacaataaagttgattgtcaacagcgtcagtaaatccgagcgtgaaagcattatcgccgcgctgcacgggcagtcgatttttaacggtggtgggctgtcgccgttaaataaaatcagcccgtctcatccgccaaaacctgccaccgtggcggtgccggaagagacggagaaaaaagcgcgtgatgtgaatgagaaaacggcgctgctgaagaagaaatccgccaccgagcttggtgagctggcaaccagtatcaacaccattgcccgtgatgcgcatatggaagcgaatctggagatggagattgttccccagggattacgcgtgctgattaaagacgaccagaaccgcgatatgtttgaacgcggcagcgcgaagattatgccgttctttaaaacgctgctggtggagctcgcgccagtgttcgactcgctcgataataaaattattattaccgggcataccgatgcgatggcctacaaaaacaatatctacaacaactggaacctttcgggtgaccgcgcgctttcggctcgtcgggtgctggaagaggccggaatgccggaagataaagtgatgcaggtaagcgcaatggcggaccagatgctgctggattccaaaaatccgcaaagcgcgggcaaccggcgcattgagattatggtgctgaccaaaagtgcgtccgatacgctgtatcaatactttggtcagcatggggataaagtggtgcagccgctggtgcaaaagctggataagcagcaggtgctttcgcagcgaacgcgttaaatgctgaatctttacgcatttctcaaaccctgaaatcactgtatactttaccagtgttgagaggtgagcaatgcgtaaaatcattcatgtggatatggactgctttttcgccgcagtggagatgcgcgacaatcccgccctgcgcgatatccctattgctattggcggcagccgcgaacgtcggggggtgatcagcaccgccaattatcccgcgcgtaaatttggcgtacgtagcgctatgccgacagggatggcgctcaaattatgcccacatctcaccttgcttccggggcgctttgacgcctacaaagaagccagtaatcatatccgtgaaatcttcagccgctacaccagccgcattgaaccgttgagtctggatgaggcttatctcgatgtcaccgatagcgtccattgccacggttctgcgaccctcatcgcccaggaaatccgccagacaatcttcaacgagctgcaactgacggcgtctgcgggcgtggcaccagtaaagtttctcgccaaaatcgcctccgacatgaataaacccaacggccagtttgtgattacgccggcagaagttccggcatttttacaaaccttaccgctggcaaaaatccccggcgtcggcaaagtcagtgcggcaaaactggaagcgatggggctgcggacctgcggtgatgtacaaaagtgtgatctggtgatgctgcttaaacgctttggcaaatttggccgcattttgtgggagcgtagtcaggggattgacgaacgcgatgttaacagcgaacggttgcgaaaatccgtcggcgtggaacgcacgatggcggaagatattcatcactggtctgaatgtgaagcgattatcgagcggctgtatccggaacttgaacgccgtctggcaaaggtaaaacctgatttactgattgctcgccagggggtgaaattaaagttcgacgattttcagcaaaccacccaggagcacgtctggccgcggctgaataaagctgatctaatcgccaccgcgcgtaaaacctgggatgaacgccgcggcgggcgcggtgtgcgtctggtggggctgcatgtgacgttgcttgacccgcaaatggaaagacaactggtgctgggattatgatgtatactattatgtatattctggtgtgcattattatgagggtatcactgtatgcatcgaattctcgctgaaaaaagcgtcaatatcactgagttacgtaaaaacccagctaaatactttattgatcaaccggttgcggttctttctaataatcgccccgcaggatatctcttaagtgccagcgcattcgaagcgttaatggacatgcttgctgaacaagaggagaaaaagcccataaaggcgcgcttccgtccaagtgctgcaagattagaggaaattacacgccgcgctgaacaatatcttaatgatatgacggatgatgatttcaatgactttaaggaataaggatgcgggtattcaaaacaaaacttattcgcctgcaacttacagcagaggaacttgatgcgttaacggcggattttatttcctataagcgtgacggtgttttgccagatatatttggtcgcgatgcactctacgacgactcctttacctggccattaatcaaatttgagcgagttgctcatattcatctggcaaatgagaataatccatttccgccacagttgcgccaattcagcagaacgaatgacgaagcgcatttggtatattgtcagggggcgtttgatgagcaagcatggttgctcattgccattctgaaacctgaacctcataaactggctcgagataacaaccaaatgcataaaattgggaaaatggcagaagcgtttcgcatgcgtttttgaatttatattatgaataacatacaaataagaaactatcagcctggcgattttcagcaactatgcgctattttcattagagcggttacgatgaccgccagtcagcattatagtccacaacaaatttccgcctgggcgcagattgacgaatctcgctggaaggagaaactcgcgaaaagtcaagtgtgggttgcgatcattaatgcacaaccggttggttttatttcccgcattgaacattatatcgatatgttatttgttgaccctgaatacacccgccgtggggttgccagcgctttgttaaaacctttgattaagtctgaatccgaacttacggtggacgcaagcataaccgcaaaacccttttttgaacgttatggttttcagacagttaagcagcagcgcgttgaatgccggggagcgtggtttactaatttttatatgcgatataaaccgcaacattaaatccagcttgcaatgaaaataacgcccgcctggtatgtgcgcgttttctgattccacaaactgcaaggaggtaaatcatgacaaatcctttatcaatgactctttgcagacctttccaggattaattctttttttcttgccctggattcgtctgccatttcctgatttttatatttatatactctaaataattcgagttgcaggaaggcgacaagcgagtgaatcgccaggagcttacataagtaagtgactggggtgaacgaacgcagtcgcagtacatgcaacttgaagtatgacgagtataaatggaatggtacatgggcaaatatattcgtcccttatccgatgcggtatttaccatcgcatctgatgacctgtggatcgagagtttagcgatccaacaattacacaccacggcaaatttacccaacatgcagcgcgtagtggggatgccagatttacaccccggacgcggctacccgattggcgcagcgttcttctctgttggtcgtttttacccggcaagacgtcgcggtaacggtgctggaaacagaaacgggccgctactctgacacactgcgtagcgcgctggtttctctcgatggcgataacgcatgggcattaagcgaaagctggtgtggcactattcagtggatttgtccgagtccgtatcggcctcatcatgggcgcaaaaactggtttctgggcattgggcgttttaccgctgatgagcaggaacaaagcgatgcaatccgttatgagacgctgcgtagcagcgggccgggcggtcaacatgtcaataaaaccgacagcgcggtacgcgccacgcatttggcatccggtattagcgtgaaggttcagagtgagcgtagtcagcatgctaacaagcggctggcacgattgctgattgcctggaagctggagcaacagcaacaggaaaatagcgcggcgctgaaaagccagcggcgaatgttccatcaccagattgaacgtggcaacccgcgacggacatttacagggatggcttttatcgaaggataatgaaggatgaaactgccggaaggcgattaaacgccatccggcagcaaatcaaataattacttcgccggaatttctttcagcagttcagtcagcagtgtccagtaatgacctacgctttcgatgtgaacttgctcatccggagagtgtggaccggtgatagttggcccgatagaaaccatgtccatttccggatacggttttttgaacagaccacattccaggcccgcgtggataatctggatgttcggcgtcttgttgaacaggcgctgataggtttcacgtaccagatgcatcaccggagaattagcgtccggctgccagccaggatatgcgcctttcgcttcggttttcgcgccagccagtttacccaggctatccagcatgctcaccacgtagtctttaccgctgtcgatcagactacggatcaggcagtgaatttctacgttattgtcagtcatggtcaccacaccgacgttcagggaggtttcaaccacacctttggctacatcggagttacgaatcacaccgttcggggtggcgttcagcagacgaataaaggtatcgcgagatttcgcaatcagggcagctttatcgttcgctacagagtccagcaacaaggccagatttttctctttttctgccagctcgtttttcaggatctcctgataggtattcaccagagatttcaggacgtcgactttatcagctgcgacagcaatggtcgcaaaggcttcacgcgggatggcgttacgcagtgtgccgccgttgaaatcgataaggcgcagatccagttcttccgcatgacccgccaggaagcgcaccagcagtttgttggcattacccagcccaacgtggatttccccgccggagtgaccgcctttcagaccttttaaggttaacttgaaggtttcaaaaccagctggaaccgcttcacgatctaaatgcaggttggaggtgaagtcgataccccccgcacaacccatgtagatttcaccttcttcttcggagtcggtgttaatcagaatatcagcctgcaaccagttgccctgtaagccgaacgcaccgtccataccggcttcttcggtcatggtcagcagcacttccagcgggccgtgaaccacgttttcgtcagccagaaccgccagcgcagaggccataccaatgccgttatccgcacccagcgtggtgccgcgcgctttaacccattcgccatcaatataaggctggataggatctttcgtgaagtcatgcacggtgtcgttatttttctgcggcaccatatcgaggtgggcctgtaagacgaccggtttacgattttccatacctgcggtagcaggtttacgaatcaggatattacctacctgatcgcgttcgacatggaaacctttctcttttgcccaaccaacaatgtattcagcgagttgctcttcatgataggacgggtgaggaatagaacagattttggcaaaaatatcccacagcggctgtggagataattgagacagttcagacacgttaagtctccttgtcgatcacccgcaaaacagtattgcaggtcacagggttagcagaaaatgttgtcaacacaagacaggcttgcgagatatgtttgagaataccactttatcccgcgtcagggagaggcagtgcgtaaaaagacgcggactcatgtgaaatactggtttttagtgcgccagatctctataatctcgcgcaacctattttcccctcgaacactttttaagccgtagataaacaggctgggacacttcacatgagcgaaaaatacatcgtcacctgggacatgttgcagatccatgcacgtaaactcgcaagccgactgatgccttctgaacaatggaaaggcattattgccgtaagccgtggcggtctggtaccgggtgcgttactggcgcgtgaactgggtattcgtcatgtcgataccgtttgtatttccagctacgatcacgacaaccagcgcgagcttaaagtgctgaaacgcgcagaaggcgatggcgaaggcttcatcgttattgatgacctggtggataccggtggtactgcggttgcgattcgtgaaatgtatccaaaagcgcactttgtcaccatcttcgcaaaaccggctggtcgtccgctggttgatgactatgttgttgatatcccgcaagatacctggattgaacagccgtgggatatgggcgtcgtattcgtcccgccaatctccggtcgctaatcttttcaacgcctggcactgccgggcgttgttctttttaacttcaggcgggttacaatagtttccagtaagtattctggaggctgcatccatgacacaggcaaacctgagcgaaaccctgttcaaaccccgctttaaacatcctgaaaccagcacgctagtccgccgctttaatcacggcgcacaaccgcctgtgcagagcgcccttgatggtaaaaccatccctcactggtatcgcatgattaaccgtctgatgtggatctggcgcggcattgacccacgcgaaatcctcgacgtccaggcacgtattgtgatgagcgatgccgaacgtaccgacgatgatttatacgatacggtgattggctaccgtggcggcaactggatttatgagtgggccacccaggcgatggtgtggcaacaaaaagcctgtgcggaagacgatccgcaactcagtggtcgtcactggctgcatgcggctacgttgtacaacattgccgcctatcctcatctgaaaggagatgacctggccgagcaagcgcaggctttgagtaaccgcgcctatgaagaggccgctcagcgtctaccgggcacgatgcggcagatggagtttaccgtacccggcggtgcgcccatcaccggctttttgcatatgccgaaaggcgatggcccgttcccgacggtattaatgtgtggtggtctggatgcgatgcagacggactattacagcctgtatgaacgttattttgcgccgcgcggcattgcgatgctgactattgatatgccgagcgtgggcttttctagtaaatggaagctcacccaggactccagcctgttgcatcagcacgtcttaaaggcgctgcctaacgtaccgtgggtggatcacactcgcgtcgcggcctttggtttccgtttcggcgctaacgttgccgtgcgtctggcataccttgaaagcccgcgtctgaaagcggttgcctgtcttggtccggtagttcataccctgttgagtgattttaagtgccagcaacaggtgccggaaatgtatcttgacgttctggccagtcgtttggggatgcatgatgcttccgatgaagcgttgcgcgtggagctgaatcgctatagtttaaaagtgcaaggattgctgggacgtcgctgcccaacgccaatgttaagtggctactggaagaacgatccgttcagcccggaagaggacagtcgcttaatcaccagtagttctgctgacggtaaattattagagatcccatttaacccggtgtatcggaattttgacaaaggtcttcaggaaatcaccgactggatcgaaaaacgcttgtgttaaaaatttgctaaattttgccaatctggtaaaacagttgcatcacaacaggagatagcaatgacgttaccgagtggacacccgaagagcagattgatcaaaaaatttaccgcactaggcccgtatattcgtgaaggtaagtgcaaagataatcgattctttttcgattgtctggctgtatgcgtcaacgtgaaaccggcaccggaagtgcgtgaattctggggctggtggatggagctggaagcgcaggaatcccgttttacctacagttaccagtttggtctgttcgataaagcaggcgactggaagagtgttccggtaaaagacactgaagtggttgaacgactggagcacaccctgcgtgagtttcacgagaagctgcgtgaactgctgacgacgctgaatctgaagctggaaccggcggatgattttcgtgacgagccggtgaagttaacggcgtgagtgaaatgtgccggatgcatcacatccggcaatattcattaaaactgatacgtcatgccaaccgcgacaatatcatcattattaatattcaatttgttatcgctatccagttggttgattttataatcaacaaacgcactcatatttttgttgaaataatacgtagcaccgacgtcgatataattgaccagatcttcatcaccgataccttcaatatctttccctttgcttaagacataacccaggcttggacgcagaccaaagtcaaactggtattgagcgaccgcttcaaagttctgtgtcttattggcaaagccgccagttattggcgtcattttgcgtgtttcagaatagaaagttgccagataaatattattggcatcgtatttcagacctgttgcccatgcttctgcacgcttgcctgtgccacggctttgcaggttctgctcgttggtgcgatcactgttggtataggccccactaatggcgaaatcgctgccgccaaagtcatatgtcaaactcgtgccgaagccatcgccgttttgctttttaacgtcgcggttttcgtttttcccttgatattgcagggttaagttcaggccatcgataacgccgaagaagtcggtgttccgatacgtcgccagaccgctggcgcgtttggtcataaagttgtcggtctgcgcgctggaatcgccaccaaattccgggaacatatcggtccaggcttccacgtcatacaacgcccccaggttacgaccataatcgaaagaacccaaatctttatatttcaacccggcaaaagcgagacgcgttttttgctgtgcagtatcactctctgctttattaccggcaaactctgcttcccaacgaccataaccagtcagttgatcgttaatttgtgtttcgcctttgaaaccaaaacggatataactctggtcgccatctttactggcgttatcactcatataatgcatggctttaactttgccatagacatccagtttattaccgtctttattatatatttctgcagcctgtacagatgcagatgccacaatgcccatcaccactaatgccagagtgctctttttcattttcattcctgattttaattaacgcgcgaatattcagcgggagagtcccgttgaaaacaggaaagtttttaacctgagattgttaaagatatattacagattaataatattcttaaaatgtggtaatttattaaatctgtaataaaagcgtaaacaactgccgctaggcttgctgatcccgcgcaacaaaacgccatgctttgctcgcagatggttggcaaccgacgacagtcctgctaaaacgttcgtttgatatcatttttcctaaaattgaatggcagagaatcatgagtgacagccagacgctggtggtaaaactcggcaccagtgtgctaacaggcggaagccgccgtctgaaccgtgcccatatcgttgaacttgttcgccagtgcgcgcagttacatgccgccgggcatcggattgttattgtgacgagcggcgcgatcgccgccggacgtgagcacctgggttacccggaactgccagcgaccatcgccagcaaacaactgctggcggcggtagggcagagtcgactgattcaactgtgggaacagctgtttagcatttatggcattcacgtcgggcaaatgctgctgacccgtgctgatatggaagaccgtgaacgcttcctgaacgcccgcgacaccctgcgagcgttgctcgataacaatatcgttccggtaatcaatgagaacgatgctgtcgctacggcagagattaaggtcggcgataacgataacctttctgcgctggcggcgattcttgcgggtgccgataaactgttgctgctgaccgatcaaaaaggtttgtataccgctgacccgcgcagcaatccgcaggcagaactgattaaagatgtttacggcattgatgacgcactgcgcgcgattgccggtgacagcgttagtggcctcggaactggcggcatgagtaccaaattgcaggccgctgacgtggcttgccgtgcgggtatcgacaccattattgccgcgggcagcaagccgggcgttattggtgatgtgatggaaggcatttccgtcggtacgctgttccatgcccaggcgactccgcttgaaaaccgtaaacgctggattttcggtgcgccgccggcgggtgaaatcacggtagatgaaggggcaactgccgccattctggaacgcggcagctccctgttgccgaaaggcattaaaagcgtgactggcaatttcagccgtggtgaagtcatccgcatttgcaacctcgaaggccgcgatatcgcccacggcgtcagtcgttacaacagcgatgcattacgccgtattgccggacaccacagccaagaaattgatgcaatactgggatatgaatacggcccggttgccgttcaccgtgatgacatgattacccgttaaggagcaggctgatgctggaacaaatgggcattgccgcgaagcaagccagctataaattagcgcaactctccagccgcgaaaaaaatcgcgtgctggaaaaaatcgccgatgaactggaagcacaaagcgaaatcatcctcaacgctaacgcccaggatgttgctgacgcgcgagccaatggccttagcgaagcgatgcttgaccgtctggcactgacgcccgcacggctgaaaggcattgccgacgatgtacgtcaggtgtgcaacctcgccgatccggtggggcaggtaatcgatggcggcgtactggacagcggcctgcgtcttgagcgtcgtcgcgtaccgctgggggttattggcgtgatttatgaagcgcgcccgaacgtgacggttgatgtcgctagcctgtgcctgaaaaccggtaatgcggtgatcctgcgcggtggcaaagaaacgtgtcgcactaacgctgcaacggtggcggtgattcaggacgccctgaaatcctgcggcttaccggcgggtgccgtgcaggcgattgataatcctgaccgtgcgctggtcagtgaaatgctgcgtatggataaatacatcgacatgctgatcccgcgtggtggcgctggtttgcataaactgtgccgtgaacagagcacaatcccggtgatcacaggtggtataggcgtatgccatatttacgttgatgaaagtgtagagatcgctgaagcattaaaagtgatcgtcaacgcgaaaactcagcgtccgagcacatgtaatacggttgaaacgttgctggtgaataaaaacatcgccgatagcttcctgcccgcattaagcaaacaaatggcggaaagcggcgtgacattacacgcagatgcagctgcactggcgcagttgcaggcaggccctgcgaaggtggttgctgttaaagccgaagagtatgacgatgagtttctgagtttagatttgaacgtcaaaatcgtcagcgatcttgacgatgccatcgcccatattcgtgaacacggcacacaacactccgatgcgatcctgacccgcgatatgcgcaacgcccagcgttttgttaacgaagtggatagctccgctgtttacgttaacgcctctacgcgttttaccgacggcggccagtttggtctgggtgcggaagtggcggtaagcacacaaaaactccacgcgcgtggcccaatggggctggaagcactgaccacttacaagtggatcggcattggtgattacaccattcgtgcgtaaataaaaccgggtgatgcaaaagtagccatttgattcacaaggccattgacgcatcgcccggttagttttaaccttgtccaccgtgattcacgttcgtgaacatgtcctttcagggccgatatagctcagttggtagagcagcgcattcgtaatgcgaaggtcgtaggttcgactcctattatcggcaccattaaaatcaaattgttacgtaagatcttatcattctcccaccaaaaaattatcttaatgtaacagctggtgtaagtaaattctatcaacgaagatcaatcttatctactgaccaaaaaggcctgatagggcttcgctcactatacatccttggctgcaggtttagttgtacaccactcctaaatttaatgtgttggcaatgtgttcaataaagctcgaacaaattagctcattatgatcggttaatacttcaacttctggttgcatgattgtttgtccgtaaaaagataacgcgcctgccgggtagtagcaggcgcattacgcaataggtaaacaagggaggaagttcagaaatgtaaatcgggaaggttgtacgcaatgttcatcgtactacgttgttacggctttgccgcaacaagccagttgcctgccgcgctcgcagaatgtctgcagcccggagataaggagattgttcctgccagctaaatcccttcctgtcgatacgaaccagctcgtatttttctaccagaaaattcacggcatcggctagggtgataccggcatcgatagtctgtatcaggaatgttcgggttaaatatcagcaaaaagcccgcatcatgaatactggatatgaagcatgagagttacctcagtgtttatataaggattcggtccccctctctggaacggtaactctcaatctgatcggttcctgcgttagttcacatcacgactcattttttcgctctcaccggcatcccatttgccacaaaatatcccgccgtgctcctcggcagcgcttcctgtccacgaatcatatccgctattttctcgccaatcataattgtcgtggcgttcaaattcccggtgataatctgcggcataatgctcgcatccaccacacgcaggccttctaacccgtgtacgcggccttcgccgtcaaccacggacatctcgtcgtaacccattttgcaggtaccgcacggatggaaggcggtttcggcgtggttacgcacgaactcatcgagctgttcatccgtctggcattcgacaccggggctgatttcgcggccacgatactgatccagcgcgggttgatgcatgatctcgcgggtgatgcgaattgcgtcgcggaactcctgccagtcctgctcgtggctcatgtagttaaacagaatcgccggatgctggtgcgggtcgcgggatttaatccgcacatgcccacggcttgggctgcgcatactgccgacgtggcactggaaaccgtgctctttcactgcattgctgccgttatagttaatcgctactggcaggaaatggtactgaatattcggccacgcaaattcctcacggctgcgaataaatccacctgcttcaaagtggttgctggcaccaacgccagtgccgccaaacagccactccgcaccgattttcggctggttccaccactgcagggcagggtagagggaaaccggttctttgcactcatattgcagatacatctccagatgatcctgaagattttcgccgacgccgggtaattcatgcaccagcggaatatcaaactccgccagcagttcagcgttgccgacgccggagcgttgcaggatctgcggactggcaatcgcgcctgcacataacagcacttctttgttggccgttgcgcgggttgggatggtgctgtcgccttccagccattcgacgcccaccgcgcgtttgccgtcaaaaatgatgtgatcggtcatagcgtgagtacgaatggtcaggttaggacggcttttggcctgatcgagatagccacgcgcggtgctggcgcgacggccctgcggcgtgacggtgcgatccatcggaccaaaaccttcctgctgataaccgttgagatcgtccgtgcgcgggtagcccgcctgcacgcccgcttcaatcatcgcttcaaacagcggattgacgccgggtttggaggtagtgacgctcaccgggccatcaccgccgtgatagtcgttttcacccatatcgcgagtctcggccttgcggtagtagggcaggcagtcgaggtagctccagttctccagaccgggttcttgcgcccagttatcgagatccagcgcattgccacggatgtagcacatgccgttgatcaggctgcttccacccagacctttaccgcgtccgcactccatgcggcggttattcataaacggttcaggttccgtttcataggcccagttgtagcgtttaccctgtagcgggaatgccagggcagcgggcatctgggtgcggaagtcaaagcgatagtccgggccgcccgcttcaagcagcagcacggaggtattcggatcttcagtcagacgggtagcgagaacgttgccggcactgccggcaccaataatgatgtagtcaaattgcaaataaacctcctggttagaatatggactggaatttagccatctcaacctggatggacttcacctgggtgtaactctggagcgtcatcacgccgttctcgcgaccaatgccggagtgtttgtagccgccaacgggcatctctgccggggattcgccccaggtgttgatccagcaaatacccgcttccagctgatgaatgacgcgatgcgcgcggttcaggtccgctgtcacgatgcccgccgccaggccgtagtcggtatcgttagcgcggcgaatgacttcgtcttcgctctcgtaggtcagaatggacatcactggcccgaagatctcttcacgcacgatggtcatatcgtcgctgcaatcggtgaacactgtcggtgcaacccatgcgccgttatcgaagccatcgcctttcagtacatcgccgccgcacagtacgcgcgcgccttcctctttgcctttggcgatatagcgcagcacgttatcgcgatgcgggaagctgaccagcgggccgaagttagtttgcggatcgaaaacgtcgcccgcgcgaatgcgctcaacgcgcgccagaattttctgctcaaatgcggctttgcatttcgccggaacgaagacgcgggtgccattggtacacacctgaccggagctgaagaagtttgccatcatggcgatatcggcggcgagatcgagatccgcatcatcgaaaacgatcagcggacttttaccgcccagttccatggtcacttctttcagggaagaggccgcgctgttagccatcacttttttgccgctggcgacaccgccggtaaaactcactttggcaatgcccggatgctcggtcagatattgcccggtctccgcgcccacgcccggcaacacgttaaatacgccgtccggcaggcccgcttcgctgtaaatttcagccagctttaacgcggtaagcggggtaacttcgctcggtttgaaaatcattgcgttgcctgccgccagcgccggggcggatttccacagggcaatctggatcgggtagttccatgcgccaatccctgccactacgcccagcggttcgcggcgggtatacacaaaggacgtttcacgcaacgggatctggctgccttccagcgccgggatcagcccggcgtagtactccagcacgtccgcaccggtaacgatatcgacggtactggtttcgctatatgcttttccggtgtcgagggtttccagttttgcgagttcgtcattgcgttcacgcagaatatcaacggcccgacgcagaatacggctgcgctccatggcggtcatgctcgcccagattttttgcccctgctgggcgcttttcacggcgcgatcgacatcctcgcgcccggcggcctgcacggtcgccagcacgttaccgttggccgggttaatggtctcgaaggtgcgaccgctggtggcggaggtataaccaccatgtatataaagctgctgttctgccattcgggacatcacgtctcctcggttaatcggtgggtagatgctgagtgataaagtggcgggtcagggaattagcgcgggttttatccagcggtttgccgctcagagccgcgcgcagccataatccatcaatcagcgcggccaggccgtagcccgcttcctgtgcctgttcgcgcggcaattcgcgacgaaactcgctcaccagattgctcagcaagcggcggctgctgacctgctgtaaacgatagagcatcggctgatgcatactgctggcccagaacgccagccaggctttcatcgccgcactgctcacctgcgtttcatcgaagtttccgccaacaatcgcctgtaatcgctgctctgcactgccctgcggaagtgcatgtaatcgattcaaaaccgcgtcacgcagctgactggtgatatcgcgcatggttgcttccagcagaccatttttgtccctgaaatagtggctgatgatccccgtagaaacgcctgcacggcgggcgatctgcgcgatcgttgcatcgtgcatgcccacttcatttattgcttccagtgtggcgtcgatcagttgtctgcgccggatgctctgcatccccaatttgggcattttcgccactccattcatcagcggtgtttatctattaaagcggttattgattggacgttcaatataaaatgtgtcttaattgttacgaatttgattttaaatagtaacaataacagtggggatactggatgacagaccttagtcacagcagggaaaaggacaaaatcaatccggtggtgttttacacctccgccggactgattttgttgttttccctgacaacgatcctgtttcgcgacttcagcgccctgtggattggccgcacgctggactgggtttctaaaaccttcggttggtactatctgctggcggcaacgctctatattgtctttgtggtctgtatcgcttgtagccgttttggtagcgtgaagctcgggccagaacaatccaaaccggaattcagcctgctgagttgggcggcgatgctgtttgctgccgggatcggtatcgacctgatgttcttctccgtagccgaaccggtaacgcagtatatgcagccgccggaaggcgcgggacagacgattgaggccgcgcgtcaggcgatggtctggacgctgtttcactacggcttaaccggctggagcatgtatgcgctgatgggcatggcgctcggatactttagctatcgttataatttgccgctcaccatccgcagcgcgctgtacccgatcttcggtaaacggattaacgggccgataggtcacagtgtggatattgcagcggtgatcggcactatcttcggtattgccactacgctcggtatcggtgtggtgcagcttaactatggcttgagcgtactgtttgatattcccgatagcatggcggcgaaagcggcactgatcgccttgagcgtgataatcgccacgatctctgtcacctccggtgtcgataagggcattcgcgtgttaagcgagcttaatgtcgcgctggcgctgggattgatcctgttcgtattgtttatgggcgacactagcttcctgcttaatgcactggtgctgaatgttggcgactatgtgaatcgctttatgggcatgacgctcaacagttttgccttcgaccgtccggttgagtggatgaataactggacgctcttcttctgggcatggtgggtggcatggagcccgtttgtcggcttgttcctggcgcgtatcagccgtgggcgtaccattcgccagttcgtgctgggcacgttgattattccgtttaccttcacgctgttatggctcagcgtgttcggcaatagcgcgctgtatgaaatcatccacggcggcgcggcatttgccgaggaagcgatggtccatccggagcgcggcttctacagcctgctggcgcagtatccggcgtttacctttagcgcctccgtcgccaccattactggcctgctgttttatgtgaccagcgcggactccggggcgctggtgctggggaatttcaccagccagcttaaagatatcaacagcgacgcccccggctggctgcgcgtcttctggagcgtggcgattggcctgctgacgctcggcatgctgatgactaacgggatatccgcgctgcaaaacaccacggtgattatggggctgccgttcagctttgtgatcttcttcgtgatggcggggttgtataaatctctgaaggtagaagattaccgccgtgaaagtgccaaccgcgataccgcaccgcgaccgctggggcttcaggatcgcctgagctggaaaaaacgtctcagccgcctgatgaattatccgggcacgcgttacactaaacagatgatggagacggtctgttacccggcaatggaagaagtggcgcaggagttgcggttgcgcggcgcgtacgtggagctaaaaagcctgccaccggaagagggacagcagttgggtcatctggatttgttggtgcatatgggcgaagagcaaaactttgtctatcagatttggccgcagcaatatagcgtgccgggctttacctaccgcgcacgcagcggtaaaagcacctactaccggctggaaaccttcctgttagaaggcagccagggcaacgacctgatggactacagcaaagagcaggtgatcaccgatattcttgaccagtacgagcggcaccttaactttattcatctccatcgtgaagcgccgggccatagcgtgatgttcccggacgcgtgattgttattgcataaaaccgcgccatgtctgcatatggcgctgtttctcctacctcttgatacgttatatctatacggttaagcccttagtatctattgatgattaccagacaacagataataaaaaagaaaagaactattgcagcccaaaacctacatttgggctgttgcgaatgttcaataagtttagtcttatttaatgtaaatattgctgatcatttgaaatgacgcattattcatgagaaatgtgtatcgtaaatcaactgaaattaacgcaaccatttgttatttaaggtttaattatctgtgtgtgatattttattgaatgttttaaatattgtttttattggcattgctataatattggttatcatttgctgaatggattcagtcttaatgagtgggtttttaagggacaggcatagagtaatgatacgtatgcataaccaacatctttactcattatgtcattgaatgttgacgctatgtgtttatgagggagaggtattttcagttgatctggattgttaaattcatataatgcgcctttgctcatgaatggatgccagtatgtagtgggaaattataaatattgaaatagtccaactacttctttattaccaaaaatgagtatctgaattttaatattgcattcttgcgtgattatctcctgagtttgacttgtgattacctttttaaggtatttagcgtaactgtttttgagcgagcatcagaggtaaagataatcttcttgatagtgatgtgggatgttatacgtatggcatcgctgatgtttatggttaccccttatgtgtgctcaggaatcgacaggtaatcactcatactgaacagcgataaaagataaaggtgtgttcatgaatagttgtgattttcgtgtttttctgcaagagttcggtacaacggttcatttgagtttgcctggtagcgtatccgagaaagaacgactgctactcaagctgctgatgcagggaatgtctgtaacagaaataagtcagtacagaaatcgcagtgcaaagacaattagtcatcaaaagaaacagctctttgagaaactggggattcagagcgatattactttctggcgcgatattttctttcagtacaatccggagatcatatccgccacggggagtaatagtcacagatatattaatgataatcactatcaccatatcgtcacgcctgaagccatcagtctggcgttggaaaaccacgaattcaaaccgtggatccaaccggttttctgcgcgcagactggcgtactgacgggctgtgaggtgcttgtccgctgggaacatccacaaacgggaattatcccaccggatcagtttattcctctggcggagagttccggtcttattgtcataatgacccgccaactgatgaaacagactgcggatattctgatgccggtaaaacatttgctgccggacaatttccatattggcatcaacgtcagcgcgggttgttttttggcagcgggatttgaaaaagagtgtctgaacctggttaataaattaggtaacgataaaatcaagctggttctcgagctaacggaacgtaaccctattccggtaacgccagaagccagagcgatatttgacagccttcatcagcacaacattacctttgcgctggatgactttggtacgggttatgcgacctatcgttacttgcaggcgttcccggtcgattttattaagatcgataagagttttgtgcaaatggcgagtgtcgacgaaatctccggtcatattgtggacaatattgtcgaactagcgcgtaagcctggtctgagtatcgtggcggaaggggtagaaacccaggagcaggcggatttaatgatcggtaaaggcgttcactttttgcagggctatttgtactctccgccagtaccgggtaataaatttatctctgaatgggtaatgaaagcaggtggttgatgtaaaccgctattcacagcgcatcgggaggttggcagcgattaattctcccgatgcagtaaatcctgatagatccccgttaatatgccatttggcgcaaattgttttttaatccactgcgtcacctgacccgtagcagaatgctgagtcgccagtaacatgcggctatcctggcgcggattatggatttgtcgggtaaccagcagggattgcgtcatcgcctcacggaccatgtaatccggcaaaaaaccaattccttcacctaaaatctggcactgacatttggtgttgaaatctggcaccagaatactctcctgcccgtgcagcaaccagcccacttttttattaatcgtatgcgcggtgtcctccaccataatattagggtagagacgcagttggctttcggcgatgggttccggcacaaaggctaacgggtgatccggggcgatagcaaaagcccagcgaatcgcgccaatttcagtgtaatcaataccgccgccgtccagtagtgtatcgggtgcgccgatggcgatattggcctgattattaataatcgcatcccagacgccgttatacacttcggtggtgacggtaatctggcaggtaggaaactgctttttcagcacctgtaacaagcgtgcggtgtgtttgggcgtataaagcagctgattaatacaaatgcgcacacgcgcttctatgccctggctaatagtatcgattctgcgtttgatggcataaaaatcattcagcaggtcggtagctttgcggaaaaaataacgcccggactccgttaactcaatgctgcgggtactgcgagtgaacagcaccacatccagccccgtctccatacgcttaatggtgtagctaatggcggaagtggttaaacccaactcttctgcggctttactgaagctgccaaaacgcgcagcggtagtaaatgccaacagattctcttcggtaaaaatactgttcattaaaccattctcgccattatctactatgaatttctccagctatgactgtagaggtatcggttaaagatagataatcatttttgaataacttttaatacccgtcgcgtttagtcgtcgcttcgcttaatttttgtccaccatattcactaattacccccacgcagttacccgccagaaaacccagtaacgtcaccgtccagttcatcccgctggcaaaaaacagcgtcatgccgagaaagccaccgggaataaaggacagtaaccagaaacgcccttgccagaccactaccgcgctgaagggtacggtagtaattacgctcgcccagaacgcggacagtccacttacagaggccagccaaccagcagtcagcgcggcgaaaaacgcccacaccatcccggaataattaaccgccagacttctgataaacccgcttttaccgccgcctgcggcataaaaactgcaaaaggcgacgaagccaatggttcctaataattcccatccttgagagagcccgacatgactagacactaactgccaaagccctgcacaaataccgacggtgacacccgttgccgtgagtccgttcatcttgttcccctctggttagacatggacgaaagctactcttacatgtgcagactatagagaaataaaacctgattgagtgaaagggtatcgggtcaaagaaacaaatattgcactaccgcacactgcgaaaagattgttgaatattattcaacaaaaaggcgagatacggcgaattaaatttaagcgggttcttttatcagattatcgttgctattctcaattcatcgaaaacagccacaaaaaccaggggaatgtgaatgagtataaaaaatctacctgccgactatttattggctgcacaacagggtgatatcgataaagtaaaaacctgccttgcgctgggtgtcgatattaatacctgcgatcgtcaggggaaaacggcaattacgctggcaagtttatatcagcaatatgcttgcgttcaggcattaattgatgccggagcggatattaataagcaagattatacctgtttaaatccttttttaattagctgtctgaacgatgatttaacgctactacgaattattttaccggctaaacccgatcttaattgcgtaacccgttttggcggtgtcggcctgacgcctgcctgtgaaaaaggccatttaagtattgtaaaagagcttttggcgcatacggagattaacgttaaccagaccaaccatgtaggctggacgccgctactggaagcgattgtgcttaatgatggtggtattaaacagcaggcgattgtgcagttattgctggaacacggtgccagcccgcatctgaccgataaatatggcaaaacgccactggaactggcgcgggaacggggctttgaagagattgcgcagttactgattgccgcaggtgcataaaccgggaggcttgctatcaacacaccagaaagacggtgtgtgtgggcgctaactgcggatgcggattttctggcgcagcgggggcaaggacaggttgaacaggtctttgccagagcggtaaatatcgcactcccggctcgccagcagttgctgacgctgctttgtgaagagtacgacaatgcgccaaacagttgtcggttggcactcactcactttgatgatctgttccggcatggtgataaggttcagtttgacgatcaaggtattacggttggtcaacatcttcatatagagatgagtcgttgtcggcgttggctgtccccaaccttgcaaatgaccgctgtgaattttcaccttatcgcctggctacagtggcacgacattattcatcagcacctgggggaaaatgaaaccctgtttaattatcgcggcgataatccgttttatcaggcgttaaataaagaattacatattaaacgacgggcagttattcaggccgtaaacgataaacaaaatatcgccagtgcggtcgccagtatgatggggttagggattggccttacgccaagtgccgacgattatttaacaggtctggcgcttattttatttattcccgggcatccggcggaaaaatacaaagaggaattttatctcggtctgcaacgcggcaaaaataataccacattattaagtgccataacgctggaagccgcattacaacaacgctgccgggaaaatattcatcgttttattcacaacattatttatgacatccctgggaacgcaactcaggcaatagaaaaaattaaacatattggctccagttccggctgcgacatgctgtatggcatggccgatggttgtgcgctgagccaaacctacggagggaattatgtcagttaattaaccaaacctacggagggaattatgagtgttaaaatagtcattaaaccgaatacctattttgattctgtcagcctgatgtctatctccacgcgtgcaaataaactcgacggcgtcgagcaggcatttgtggcgatggcgaccgaaatgaataaaggcgtgctgaagaatttaggactgctgacgccggagctggagcaggcgaaaaacggcgacctgatgattgtcatcaatggtaaaagcggtgcggacaacgagcagttactggtggagattgaagaactgttcaacaccaaagcgcaaagcggcagccacgaggcgcgttacgccactattggcagcgccaaaaagcatatcccggaaagtaacctggcggtgattagcgtcaacggtctgtttgccgctcgcgaagcgcgtcaggcgctgcaaaacgatctcaacgtgatgctgttttccgataacgtcagtgttgaagatgaactggcgctcaagcaactggcccacgaaaaagggctgctgatgatggggccagactgtggcacggcgattatcaacggcgcggcgctctgttttggtaacgccgtgcgtcgcggcaacatcggtattgttggcgcatccggcaccggcagtcaggagttgagcgtccgcattcatgaatttggcggcggcgttagccaactgattggcaccggcgggcgcgacctgagcgagaaaatcggcggcctgatgatgctcgacgccatcgggatgctggaaaacgatccgcaaactgaaatcattgcgcttatctccaaaccgcctgcgcctgcggtggcccgcaaagtgctggaacgtgcgcgcgcctgccgcaagccggtggtcgtctgcttcctcgatcgtggcgaaacgccagtggatgagcaggggctacagtttgcccgcggcaccaaagaggcagcgctaaaagcggtgatgctctccggcgtgaaacaggaaaatctcgacctgcatacgcttaaccagccgttgattgcggatgtgcgtgcgcgtctgcaaccgcagcagaaatacattcgtggcctgttctgcggcggcacgctgtgcgacgaaaccatgttcgcggtgatggaaaaacatggcgatgtctacagcaacattcagcccgatccggaattccgcctgaaagatatcaaccgcagcatcaaacacaccttcctcgactttggcgatgacgacttcaccaatggcaagccgcacccgatgattgaccccaccaaccgcatcagtcgcttgatcgaagaggcgcgcgatccagaagtggcggtgatcgtgatggattttgtgctcggatttggaagccatgaagatccggtcggctccaccatcgagacgatcaaagaagcgaaagcgatcgccgctgccgaaggacgcgagttgatcattctcgcctatgtgctgggtaccgatcttgatacgccaagcttagaacaacaaagccagatgctgcttgatgccggagtgattctggcgagcagcagcaccaataccggattgctggcgcgtgaatttatctgcaaaggggaggaagcctgatgagccagagtctgtttagccaaccattgaacgttattaacgtcggcatcgccatgtttagcgatgacctgaaaaagcagcatgtagaagtgactcaactcgactggacgccgccggggcagggcaatatgcaggtggtgcaggcgctggataacattgccgatagcccgctggcggacaaaatcgccgccgctaaccagcaggcgctggagcgtattatccagagccatccggtgctgattggttttgatcaggcgattaacgtggtgccgggcatgacggcgaaaaccattcttcacgccgggccgccgatcacctgggaaaaaatgtgcggcgcgatgaaaggcgcggtcaccggagcgctggtgttcgaaggactggcgaaagatctcgacgaggcggctgaactggcggcttccggggagatcaccttcagcccgtgtcacgagcacgactgcgtgggaagcatggcgggtgttaccagcgccagcatgtttatgcacatcgtaaaaaacaaaacctacggcaacatcgcttataccaacatgagcgagcagatggcgaagattttgcgtatgggcgctaacgaccagagcgtgattgaccgcctgaactggatgcgtgatgtgcagggaccaatactgcgcgacgcgatgaaaattatcggcgaaatcgatctgcgcttaatgctggcgcaggcgctgcatatgggcgatgagtgccataaccgcaataacgccgggacgacactgctgattcaggcgctgacgccggggattattcaggcgggttattccgtcgagcaacagcgcgaagtgtttgagtttgtcgccagcagcgactacttctccggcccgacgtggatggcgatgtgtaaagcggcgatggatgcggcgcatggcatcgaatacagcaccgtggtcaccaccatggcgcgtaacggcgtcgagttcggcctgcgggtcagcggcctgccggggcaatggtttaccggcccggcgcagcaggtgatcggcccgatgtttgccggttataagccggaagatagcgggctggatatcggcgacagcgccatcaccgaaacctacggtattggcggatttgctatggcgaccgcgcccgctatcgtcgcgctggtgggcggcacggtggaagaagctattgatttctcccgtcagatgcgcgaaatcaccctcggtgaaaaccccaacgtcaccattccgctgctcggttttatgggcgtgccgagcgcaatcgacatcacccgcgtgggtagcagcggcattctgccggtgatcaacaccgccatcgcccataaagatgcgggcgtcggcatgattggcgcgggcattgtgcatccaccttttgcctgcttcgagaaagccattcttggctggtgcgaacgttacggcgtctgacctacatgttcatgccggatgcggcgtgaacgccttatccggcctacgaatggcgcaagaatctgtaggcctgataagcgtagcgcatcaggcatttgtcaccattgccggatgcggcgtgaacgccttatccggcctacgaatggcgcaagaatctgtaggcctgataagcgtagcgcatcaggcatttgccaccactgccggatgcggcgtggacgccttatccggcctacgagtggcgcgagaatctgtaggcctgataagcgtagcgcatcaggcatttgtcaccattgccggatgcggcgtgaacgccttatccggcctacgagtggcgcgagaattgtaagcctgataagcgtagcgcatcaggcagtctggcgttggtcataaccccatcaccctctgtagcggacataacaacatgaaagagcttgtggtcgttgccattggtggcaacagcattatcaaagataacgccagccagagcattgagcatcaggcggaggcggtgaaagccgtcgccgatacggtgctggaaatgctggcttccgattacgacattgtgctgacccacggcaacgggccgcaggtcgggctggatttacgccgtgcggagattgcccacaagcgcgaagggctgcccttaacgccgctggcgaactgtgtggcagatacgcagggcggcatcggctatctgatccaacaggcgctgaataaccggctggcgcgtcacggcgagaagaaagccgtcaccgtggtgactcaggtggaagtggataaaaacgatccaggttttgcccatcccaccaagcccatcggcgcattctttagtgacagccagcgtgacgaattacaaaaggcaaaccctgactggtgttttgttgaagatgccgggcggggctatcgccgcgtggtcgccagcccggaaccgaaacgtattgtcgaagcacctgccattaaagcgctgatccaacaaggttttgtcgtaattggcgcgggcggcggtggaattccggtagtgcgtactgacgcgggagattaccaaagcgtggacgcggttatcgacaaagatctctctaccgcgctgctggcccgtgaaattcacgccgacattcttgtgatcaccactggcgtcgaaaaagtgtgtattcactttggcaaaccgcagcagcaggcgctcgatcgggtggatattgccaccatgacccgctatatgcaggaagggcatttcccgcccggcagcatgttgccaaaaatcatcgccagcctgacatttttagaacaaggcggcaaagaagtgattatcaccacgccggaatgcctgcctgcggcgctgcgcggcgaaacgggcactcatattattaaaacgtaaggacgtaagatgaaagaaagcaatagccgccgtgaatttctgagccagagcggtaagatggtcaccgccgccgcgctgtttggtacctctgtgccgctcgcccatgcggcggtagctggcaccctaaactgcgaagcgaacaacaccatgaaaatcactgacccgcattactatctcgataacgtgctgctggaaaccggttttgactacgaaaatggcgtggcggtgcagacccgcacggcgcgccagaccgtggagattcaggacggcaaaattgtcgccctgcgcgagaacaagctgcatccggacgccacgctgccgcactatgacgctggcggtaagctgatgctgcccaccacccgcgacatgcatattcatctcgacaaaaccttttacggcgggccgtggcgcagcctcaatcgtccggcaggcaccaccatccaggacatgatcaaactcgagcagaaaatgctgccggaactgcaaccgtacactcaggagcgggcagaaaaactgattgatttattgcagagcaaaggcaccaccattgcccgcagccactgcaatatcgaaccggtttccggcctgaaaaatctgcaaaatttgcaggcggtgctggcgcgacgtcaggcgggctttgagtgtgaaatcgtcgccttcccgcagcacggtttgctgctgagcaaatctgaacctttaatgcgtgaagcgatgcaggcgggggcgcattacgtcggcggcctggacccgaccagtgttgatggcgcgatggaaaaatccctcgacaccatgttccagattgcgctggactacgacaaaggcgtcgatattcacctgcacgaaaccactccggcaggcgtggcagccatcaattatatggttgaaacggtagagaaaacgccacagctgaagggcaagctgaccatcagtcacgcctttgcgctggcaacgctcaacgagcaacaggtagatgaactggcgaaccggatggtggtgcaacaaatttctatcgccagcacggtgccgattggcacgctgcatatgccgctcaaacagttgcacgacaaaggcgtaaaagtgatgactggcactgacagcgttatcgaccactggagcccttatggtctgggcgacatgctggaaaaagccaatctgtacgcgcagctctatattcgtcctaacgaacagaacctctcccgcagcctgtttttagccactggcgatgtattgccgctgaatgaaaaaggcgagcgtgtatggccaaaagcgcaggatgacgccagctttgtgctggtggacgcctcctgttccgccgaggcggtggcgcgtatcagcccgagaaccgcaacgttccataaagggcaactggtgtgggggagtgtggcaggttgatgcgcatttgaaacgcctgcaacggtgaatagtaagagatttaagccccagggagtggggcaatctgaatatgagtgtgtcggcagaaatggacattatctttgaggaatatgcccttattgacgttgtgtagataactatttgtctacgtgaaaagatcatcagttttgccgattttagtcttttacagatagcaaatatcacacttacaggcgctcgccttatggggaacgttgctgctctgtttcattcaggctcgcggcatgttggggctggatcgggtggtttaaatattggctatattcaatggacgcgttttgccgcgatgacatatcaggcgttgccaaatacacatagctaatcaggagtaaacacaatgaagatcaaagctgttggtgcatattccgctaaacaaccacttgaaccgatggatatcacccggcgtgaaccgggaccgaatgatgtcaaaatcgaaatcgcttactgtggcgtttgccattccgatctccaccaggtccgttccgagtgggcggggacggtttacccctgcgtgccgggtcatgaaattgtggggcgtgtggtagccgttggtgatcaggtagaaaaatatgcgccgggcgatctggtcggtgtcggctgcattgtcgacagttgtaaacattgcgaagagtgtgaagacgggttggaaaactactgtgatcacatgaccggcacctataacagcccgacgccggacgaaccgggccatactctgggcggctacagtcaacagatcgtcgttcatgagcgatatgttctgcgtattcgtcacccgcaagagcagctggcggcggtggctcctttgttgtgtgcagggatcaccacgtatagcccgctacgtcactggcaggccgggccgggtaaaaaagtgggcgtggtcggcatcggcggtctgggacatatggggattaagctggcccacgcgatgggggcacatgtggtggcatttaccacttctgaggcaaaacgcgaagcggcaaaagccctgggggccgatgaagttgttaacagtcgcaatgccgatgagatggcggctcatctgaagagtttcgatttcattttgaatacagtagctgcgccacataatctcgacgattttaccaccttgctgaagcgtgatggcaccatgacgctggttggtgcgcctgcgacaccgcataaaagcccggaagttttcaacctgatcatgaaacgccgtgcgatagccggttctatgattggcggcattccagaaactcaggagatgctcgatttttgcgccgaacatggcatcgtggctgatatagagatgattcgggccgatcaaattaatgaagcctatgagcgaatgctgcgcggtgatgtgaaatatcgttttgttatcgataatcgcacactaacagactgaaaaaattaataaataccctgtggtttaacatattaacttcgctctccacttaactttttagttaaggagagcgaaataatatcaaagtagcagtaaaacctataacgtaaatttaaattgttaaattaacgccctccagtacacaatacttcacacgttagttatgagcgatttctgatagtgcctggtttaatcagagctttattatctgcgacgtttatttttatttaagagagatcgcgatgataagtttaaaagctccgcacaataatttgatgccatatacgcaacaaagcatacttaatacggttaaaaacaatcagttaccagaggatatcaaaagctccctggtttcctgtgtcgatatattcaaggttttgattaaacaatattatgattatccttatgattgtcgtgatgatttagtcgatgacgacaaactcattcatctcatggctgccgtacgagactgtgagtggagtgacgataacgcactcaccataaatgtgcagtttaatgatttccctggattttatgactggatggattaccctgatcacccggttaagtttgtttttcacatacttgaaaatcaaaaagggacagtttgggtatatgaccaggatgatgcgtttcttgatattaaagcaaacgtgcaggctggacgctttaccgggcttaagaaattagtgcagtttatcgatagtgtgcgaacagattgcaaatgtattcttcttgaataccatatgcctttgctgagaattttccctaaagggaaagagtgtatgcatgtggaaaaatggcttcgcgaaatgagctctattccggagacagacgcgcccattaagcaggcgcttgcgcatggattattattacacttaaaaaatatctaccctgtttttcctgaaagtctggtgatgttattgctctctgttctggacgtaaaaacatacagagatgatgcgcgattaaatgaatggatatctaatagagtgcaggaattaggtgacagatattatcctgtaaataagcacgttaaaatccgctacactctttaattcagaaagggttccacctgcaagttgttattccacctgagagtgaatcgcaatgcaggtaatcatttcatctgtatatctgtatgccaactggcattccatctcttttttcgccgatattttgttgtgatcggcgacacttcgcttaaaaaagcaccagtagtggtttcgcagccatgcggtgtataaaaaatgatctcatgcagatgttttgtgaatgtgttggttgacattcatatgaaaaaaatcataattccatcatgtttgtgtggggtcttttctgtatcttacgcatcgcactcaagcctgacagaaaatatgctgtaaggctcatatcaaaaaccgccattagctcatcaggaagagcagacgacaaccaggattgttgtatggtacggggttcgaggcctcgatggcggtccaacttttcaaaactcttctgaatcagatccccttattaagttccctgcaaagtggaacattgccattgtttggctatagtggatggggcagaccaatgaaaaaagcccacacaggggagagtgggctgaaatgggaggctaaagacagtagtaaacttatcggaaataaggaccacgcattacgggggctaagtagcccgatggccgtgattcggcaaatcaggttgattacgtaaagagtaaattatctgctcaccgctgcgtcaccccttcgtaaatcaggcgtagcgcgaatacaccaataattgcaccaataacccgactggcaacgcgttgcatacgcccataagcacgacgcacagcgggcaaagaaaacgcctgactaagaaaaactcgccagataatacttgcgagcacaatccccgcccaggccattaaacgtgcccatgttggtgtttctgcatttaatgttacactgaaaatactgataaaaaataaaacggtttgcgggttagagagatcggtaattaatccgcggcgaaaaaagacataccagggggcgctaatcggttgttgtagtgtgctcatttgcggtgtactctggcggcgcatgctgcaccacgcaaaccataagagataagcgccgccgacgattctgataaggctaaaaatctcctcacactgcgtaattagcgttgcaagaccaaacaaacccaacccggaataaaatgcatcgcccagcgccacgcccagcccggtcagcacccctgcgcgtcgaccggaagccaggctggtttgtactaccacaaagagattggctcccggattaaaaaaagtaatcacgaacagtcctacggtcaggtaaacggcatgcaaaggatccatagtgatttcatccataaataagtgaactaactgcatcatatttctaccaaaaataatcgggtgcgagagagatcacaaagtgtcttatttccggttactggcgtttatgccctgactgaactaattattaatcaacccaataatgtgggtgggtgatagtgtgataacaactctggagccgtaatatgaaaataatctctaaaatgttagtcggtgcgttagcgttagccgttaccaatgtctatgccgctgaattgatgaccaaagcggaatttgaaaaagttgaaagccagtatgaaaaaataggtgatattagtaccagcaatgaaatgagcactgcagatgcaaaagaagatttgatcaaaaaagcggatgaaaaaggggctgatgtgttggtactgacctccggtcaaactgacaataagatccacggcacggcaaatatttataagaagaagtaattctgaatcctatgtaaacatctccgatgcgtaagtttatcggtgatcatctattgaaatttatgccggataaagcgttcgcgctgcattcggcagttcagcttttcagccgccgccagaacgtcgtccggctgatgcctaaataattcgccgctgctgttttatcgccattaaatttctccagtgcctgttgtggtgtcagtaagcgtggagcgggagttttcgcgctctcgcgcgccagttccggcagtagcagttgcataaactgcggcgttaaatccggcgtcggttccacacttaaaaacagcgccagtcgttccatcatattgcgcagttcacgaatattgcctggccagtcgtagtgcagcagcacagtttcacttgcctgtaacccctggcgtaatgcagcagaaaatggggcggagagcgccgccagagacactttcaaaaagctttccgccagcggaagaatatccgccacccgctcgcgcagtggtggcaattgcagacgcaaaatactcagccgataaaacagatcacggcgaaaacgtccttgctgcatatcttcttccagattgcagtgagtggcgctaatgacccgtacatctaccggaacaggctgatgcccgccgacgcgggtgacctctttttcttccagcacccgcagcagccgggtctgcaaaggtagcggcatttcgccaatctcatccagaaacagcgtaccgccgtgggcaatttcgaacagcccggcgcgacctccgcgtcggctgccggtaaacgccccttcctcatagccaaacagttctgcttccagcaggctttcggcaatcgccccgcagttgacggcaacaaacggatggctctttttgccctgtcgcgcatcgtggcgggcaaaatattcccgatgaatcgcctgggccgccagctctttgcccgtccccgtttccccctcaatcaacaccgccgcactggagcgggcatacagcaaaatagtctgccgtacttgttccatctgtggactttgaccgagcatatcgcccagcacgtaacgagtacgcagggcgttgcgggtggcatcgtgagtgttatggcgtaagctcatgcgcgtcatatccagcgcatcgctgaacgcctggcgcacggtggcggcggaatagataaaaattccggtcattccggcttcttctgccaaatcggtaatcagccctgcgccgaccaccgcttcggtgccgttagcttttagctcgttaatctgcccgcgtgcgtcttcctcggtaatgtagctacgttggtcgaggcgcaaattaaaggttttttgaaacgccaccagcgctggaatggtttcctgataggtgacaacgccgatagaagaggtgagttttccggcttttgccagtgcctgtaacacatcgtagccgctcggtttaatcaaaataactggcacactcaggcggcttttcaggtacgcgccgttagagccagccgcgatgatggcgtcacagcgttcgtttgccagtttcttgcggatgtaggtcactgctttttcaaagccaagctgaataggggtaatgttcgccaggtgatcaaactcgaggctgatatcgcgaaacagctcgaacaggcgcgttacagataccgtccagataaccggtttgtcgtcattaagccgtggtggatgtgccatagcgcaccgcaaagttaagaaaccgaatattgggtttagtcttgtttcataattgttgcaatgaaacgcggtgaaacattgcctgaaacgttaactgaaacgcatatttgcggattagttcatgactttatctctaacaaattgaaattaaacatttaattttattaaggcaattgtggcacaccccttgctttgtctttatcaacgcaaataacaagttgataacaaaggatgggctatgtctctacactctccaggtaaagcgtttcgcgctgcactgactaaagaaaatccattgcagattgttggcaccatcaacgctaatcatgcgctgttggcgcagcgtgccggatatcaggcaatttatctttctggcggtggcgtggcggcaggtagcctggggctgcccgatctcggtatttctacccttgatgatgtgctgaccgacattcgccgtatcaccgacgtttgtagcctgccgctgctggtggatgcggatatcggttttggttctagcgcctttaacgtggcgcgcaccgtgaaaagcatgattaaagccggtgcggcaggattgcatattgaagatcaggttggtgcgaaacgctgcggtcatcgtccgaataaagcgatcgtcagcaaagaagagatggtggatcggatccgcgcggcggtggatgcgaaaaccgatcctgattttgtgatcatggcgcgcaccgatgctctggcggtagaggggctggatgcggcgatcgagcgtgcgcaggcctatgttgaagcgggtgccgagatgttgttcccggaggcgattaccgaactcgccatgtaccgccagtttgccgatgcggtgcaggtgccgatcctcgccaacatcaccgaatttggtgccacgccgctgtttaccaccgacgaattacgcagcgcccatgtcgcaatggcgctgtacccacttagtgcgttccgcgccatgaaccgcgccgctgaacatgtctacaacgtcctgcgccaggaaggcacgcagaaaagcgtcatcgacaccatgcagacccgcaacgagctgtacgaaagcatcaactactaccagtacgaagagaagctcgacaacctgtttgcccgtagccaggtgaaataaaaaacgcccgttgattgtattcgacagccgatgcctgatgcgtcgctgacgcgacttatcaggcctacgaggtgcactgaactgtaggtcggataagacggatggcgtcgcatccgacaaccgatgcctgatgcgccgctgacgtgacttatcaggcctacggggtgcactgaactgtaggtcggataagacgcatagcgtcgcatccgacaaccgatgcctgatgcgccgctgacgcgacttatcaggcctacggggtgcactgaactgtaggtcggataagacgcatagcgtcgcatccgacaaccgatgcctgatgcgccgctgacgcgacttatcaggcctacggggtgaactgaactgtaggtcggataagacgcatagcgtcgcatccgacaacaatctcgaccctacaaatgataacaatgacgaggacaacatgagcgacacaacgatcctgcaaaacagtacccatgtcattaaaccgaaaaaatctgtggcactttctggcgttccggcgggcaatacggcgctctgcaccgtgggtaaaagtggcaatgacctgcattaccgcggctacgatattcttgatctggcgaaacattgcgaatttgaagaagtggcgcatctgctgatccacggcaaactgccgacccgtgacgaactcgccgcttacaaaacgaaactgaaagccctgcgcggtttaccggctaacgtgcgtaccgtgctggaagccttaccggcggcgagccacccgatggatgttatgcgcaccggtgtttccgcgctcggctgcacgctgccagaaaaagaggggcataccgtctctggcgcgcgggatattgccgacaaactgctggcgagccttagcagcattctcctttattggtatcactacagccacaacggcgaacgcatccaaccggaaaccgatgacgactccatcggcggtcacttcctgcatctgctgcacggcgaaaagccaagccaaagctgggaaaaggcgatgcatatcagcctggtgctgtacgccgaacacgagtttaacgcctccacctttaccagtcgggtgattgcgggcaccggctctgatatgtattccgcgattattggcgcgattggcgcactgcgcgggccaaaacacggcggggcgaatgaagtgagcctggagatccagcaacgctacgaaacgccggacgaagccgaagcagatatccgcaagcgcgtggaaaacaaagaagtggtcattggttttggtcatccggtttacaccatcgctgacccgcgccaccaggtgattaaacgtgtggcgaagcagctcagccaggaaggcggcagcctgaagatgtacaacatcgccgatcgcctggaaacggtgatgtgggagagcaaaaagatgttccccaatctcgactggttctctgctgtttcctacaacatgatgggcgttcccaccgagatgttcacaccactgtttgttatcgcccgcgtcaccggctgggcggcgcacattatcgaacaacgtcaggacaacaaaattatccgtccttccgccaattatgttggaccggaagaccgcccgtttgtcgcgctggataagcgccagtaaacctctacgaataacaataaggaaacgtacccaatgagtgctcaaatcaacaacatccgcccggaatttgatcgtgaaatcgttgatatcgtcgattacgtcatgaactacgaaatcagctctaaagtggcctacgacaccgcacattactgcctgctcgacacgctcggctgcggtctggaagctctcgaatacccggcctgtaaaaaactgctggggccaattgttcccggcaccgtcgtacccaacggcgtgcgcgtccccggaactcagttccagctcgaccccgtccaggcggcatttaacatcggcgcgatgatccgctggctcgatttcaacgatacctggctggcggcggagtggggccatccttccgacaacctcggcggcattctggcaacggcggactggcttagccgcaacgcggtcgccagcggcaaagcgccgttgaccatgaaacaggtgctgaccgcaatgatcaaagcccatgaaattcagggctgcatcgcgctggaaaactcctttaaccgcgtcggcctcgaccacgttctgttagtgaaagtggcttccaccgccgtggtcgccgaaatgctcggcctgacccgcgaggaaattctcaacgccgttagcctggcgtgggtggacggtcagagcctgcgcacctatcgccatgcgccgaacaccggcacgcgtaaatcctgggcggcgggcgatgccacttcccgcgcggtacgtctggcactgatggcgaaaacgggcgaaatgggttacccgagtgccctgactgcgccggtgtggggcttctacgacgtctcctttaaaggtgaaagcttccgcttccagcgcccgtacggttcctacgttatggaaaatgtgctgttcaaaatctccttcccggcggagttccactcccagacggcagttgaagcagcgatgacgctctatgaacagatgcaggcagcaggcaaaacggcggcggatatcgaaaaagtgaccattcgcacccacgaagcctgtattcgcatcatcgacaaaaaagggccgctcaataacccggcagaccgcgatcactgcattcagtacatggtggcgatcccgctgctattcgggcgcttaacggcggcagattacgaggacaacgttgcgcaagataaacgcattgacgccctgcgcgagaagatcaattgctttgaagatccggcatttaccgctgactaccacgacccggaaaaacgcgccatcgccaatgccattacccttgagttcaccgacggcacacgatttgaagaagtggtggtggagtaccccattggtcatgctcgccgccgtcaggatggtattccgaaactggtcgataaattcaaaatcaatctcgcgcgccagttcccgactcgccaacagcagcgcattctggaggtttctctcgacagagctcgcctggaacagatgccggtcaatgagtatctcgacctgtacgtcatttaagtaaacggcggtaaggcgtaagttcaacaggagagcattatgtcttttagcgaattttatcagcgtagcattaacgaaccggagcagttctgggccgagcaggcccggcgtattgactggcagacgccctttacgcaaacgctcgatcacagcaatccgccgtttgcccgttggttttgtgaaggccgaaccaacttgtgccacaacgccatcgaccgctggctggagaaacagccagaggcgctggcgctgattgccgtctctagcgaaacagaagaagagcgcacctttacctttcgtcagctgcatgacgaagtgaacgcggtggccagtatgttgcgtagtttgggtgtgcagcgcggcgatcgggtgctggtgtatatgccgatgattgccgaagcgcatattactctgctggcctgcgcgcgcattggcgctattcacagcgtggtgtttggtggatttgccagccacagcgtggcggcgcgaattgatgacgctaaaccggtgctgattgtcagcgctgatgccggagcgcgcggtggcaaaatcattccctataaaaaattgctcgacgatgcgataagtcaggcgcagcaccagccacgccatgttttgctggtggatcgcgggctggcgaaaatggcgcgcgtcagcgggcgggatgtcgatttcgcgagcttgcgccatcaacacatcggcgcgcgggtaccggtggcgtggctggaatccaacgaaacctcctgcattctctacacttccggcacgaccggcaaacctaaaggcgtgcagcgtgacgtcggcggatatgcggtggcgctggcgaccagcatggacaccatttttggcggcaaagcgggcagcgtgttcttttgcgcaagcgatatcggctgggtggtggggcatagctatatcgtttacgcgccgctgctggcggggatggcgactatcgtttacgaaggattgccgacctggccggactgcggcgtgtggtggacaatcgtcgagaaatatcaggttagccggatgttcagtgcgccgaccgccattcgcgtgctgaaaaaattccctaccgctgaaattcgcaaacacgatctcagcagcctggaagtgctctatctggctggagaaccgctggacgagccgaccgccagttgggtgagcaatacgctggatgtgccggtcatcgacaactactggcagaccgaatccggctggccgattatggcgattgctcgcggtctggacgacaggccgacgcgtctgggaagccccggtgtgccgatgtatggctataacgtgcagttgcttaatgaagtcaccggcgaaccgtgtggcgtcaacgagaaagggatgctggtggtggaagggccgctgccgccggggtgtattcagaccatctggggcgacgacggccgctttgtgaagacttactggagcctgttttcccgcccggtgtacgccacctttgactggggcatccgtgacgctgacggttatcactttattctcgggcgcactgacgatgtaattaacgttgccgggcatcggctggggacgcgcgagattgaagagagtatctccagccatccgggcgttgccgaagtggcggtggttggggtgaaagatgcgctgaaagggcaggtggcggtggcgtttgtcattccgaaagagagcgacagtctggaagatcgtgatgtggcgcacagccaagagaaggcgattatggcgctggtggacagccagattggcaactttggccgcccggcgcacgtctggtttgtcagccaattgccaaaaacgcgatccggaaaaatgctgcgccgcacgatccaggcgatttgcgaaggacgcgatcctggagatctgacgaccattgatgatcctgcgagcttggatcagatccgccaggcgatggaagagtaagttattgtcggatgcgtcgcgcggtgcatccggcactgtgtgccgatgcctgatgcgacgctgacgcgttttatcatgcctacggacctgaaccgtaggtcggataaggcgctcgcgtcgcatccgacaccatgctcagatgcctgatgcgacgctgacgcgtcttatcaggcctacccactgtttttacaccgataatttttcccccacctttttgcactcattcatataaaaaatatatttccccacgaaaacgattgctttttatcttcagatgaatagaatgcggcggattttttgggtttcaaacagcaaaaagggggaatttcgtgagccaagataacaactttagccaggggccagtcccgcagagcgcgcggaaaggggtattggcattgacgttcgtcatgctgggattaaccttcttttccgccagtatgtggaccggcggcactctcggaaccggtcttagctatcatgatttcttcctcgcagttctcatcggtaatcttctcctcggtatttacactagttttctcggttacattggcgcaaaaaccggcctgaccactcatcttcttgctcgcttcagctttggtgttaaaggcagttggctgcctagtctgctactgggcggaactcaggttggctggtttggcgtcggtgtggcgatgtttgccattccggtgggtaaggcaaccgggctggatattaatttgctgattgccgtttccggtttactgatgaccgtcaccgtcttttttggcattagcgcgctgacggttcttagcgtgattgcggttccggctatcgcctgcctgggcggttattccgtgtggctggctgttaacggcatgggcggcctggacgcattaaaagcggtcgttcccgcacaaccgttagatttcaatgtcgcgctggcgctggttgtggggagttttatcagtgcgggtacgctcaccgctgactttgtccggtttggtcgcaatgccaaactggcggtgctggtggcgatggtggcctttttcctcggcaacagcttgatgtttattttcggtgcagcgggcgctgcggcactgggcatggcggatatctctgatgtgatgattgctcagggcctgctgctgcctgcgattgtggtgctggggctgaatatctggaccaccaacgataacgcactctatgcgagcggtttaggtttcgccaacattaccgggatgagcagcaaaacccttagcgtaatcaacggtattatcggtacggtctgcgcattatggctgtataacaattttgtcggctggttgaccttccttagcgcagctattcctccagtgggtggcgtgatcatcgccgactatctgatgaaccgtcgccgctatgagcactttgcgaccacgcgtatgatgagtgtcaattgggtggcgattctggcggtcgccttggggattgctgcaggccactggttaccgggaattgttccggtcaacgcggtattaggtggcgcgctgagctatctgatccttaacccgattttgaatcgtaaaacgacagcagcaatgacgcatgtggaggctaacagtgtcgaataactaagacgcatgtggaggctaacagtgagcaataacgctttacaaacaattattaacgcccggttaccaggcgaagaggggctgtggcagattcatctgcaggacggaaaaatcagcgccattgatgcgcaatccggcgtgatgcccataactgaaaacagcctggatgccgaacaaggtttagttataccgccgtttgtggagccacatattcacctggacaccacgcaaaccgccggacaaccgaactggaatcagtccggcacgctgtttgaaggcattgaacgctgggccgagcgcaaagcgttattaacccatgacgatgtgaaacaacgcgcatggcaaacgctgaaatggcagattgccaacggcattcagcatgtgcgtacccatgtcgatgttagcgatgcaacgctaactgcgctgaaagcaatgctggaagtgaagcaggaagtcgcgccgtggattgatctgcaaatcgtcgccttccctcaggaagggattttgagctatcccaacggtgaagcgttgctggaagaggcgttacgcttaggggcagatgtagtgggggcgattccgcattttgaatttacccgtgaatacggcgtggagagcctgcataaaaccttcgccctggcgcaaaaatacgaccgtctcatcgacgttcactgtgatgagatcgatgacgagcagagccgctttgtcgaaaccgttgctgccctggcgcaccatgaaggcatgggcgcgcgagtcaccgccagccacaccacggcaatgcactcctataacggggcgtataccagtcgcctgttccgcttgctgaaaatgtccggtattaactttgtcgccaacccgctggtcaatattcatctgcaaggacgtttcgatacgtatccaaaacgtcgcggcatcacgcgcgttaaagagatgctggagtccggcattaacgtctgctttggtcacgatgatgtcttcgatccgtggtatccgctgggaacggcgaatatgctgcaagtgctgcatatggggctgcatgtttgccagttgatgggctacgggcagattaacgatggcctgaatttaatcacccaccacagcgcaaggacgttgaatttgcaggattacggcattgccgccggaaacagcgccaacctgattatcctgccggctgaaaatgggtttgatgcgctgcgccgtcaggttccggtacgttatagcgtacgtggcggcaaggtgattgccagcacacaaccggcacaaaccaccgtatatctggagcagccagaagccatcgattacaaacgttgaacgactgggttacagcgagcttagtttatgccggatgcggcgtgaacgccttatccggcctacgtagagcactgaactcgtaggcctgataagcgtagcgcatcaggcaattccagccgctgatctgtgtcagcggctaccgtgattcattcccgccaacaaccgcgcattcctccaacgccatgtgcaaaaatgccttcgcagcggctgtctgccagctgtagtttatgccggatgcggcgtgaacgccttatccggcctacgtagagcactgaactcgtaggcctgataagcgtagcgcatcaggcaattccagccgcagacctgtgtcagcggttaccgactttcatttccgccaacaaccgcgcatttatccaacgccatgtgcaaaaatgccttcgcggcggctgtctgccagctatttttccgccgcaacaaaaccgccgttctctccagtagtggcggggcaagagaaatagctttaagcccgtcatgttgtgtggcaatcgctgctggtaacaatgtggaaagggaagtgcggcgaatcagctccagaaccgcgctaatactgttcgcctcaatgaccacctgtggatgtagccccgctttctcgcagtagtggtcaatttgctctctggtggcaaattccgcgctgagcaggaccagtttttcatcatgcaagcgactcaacgccacctgttcatggacggccagcggatgatgttgcgccacgactaacgctaaactttctgtcagtaaaggaattgcctccagctccgggctatgcacaggcgcgaaggcaatcccaacgtccaactcgtcgcggcaaagcatatcctcgattttctcctggctcatttcctgtagctggagcgtgatgctgggatagcgcgcatagaaatccgccattaaggggccgataaagtagctcgtaaaggtgggggtgacggcgatacgcaggcttcctcgcgtcagatcggcaacatcatgaatcgcccgtttacccgcccccagttcctgtaacgcccggctggcgtactgtcgccagacttctcctgcatcagtgagacgaatcgttcgcccgctacggtcaaacagcggcacgcctaaactctcctctaactggcgaatctgctgggaaagcgcaggttgggagacgtgcaacgcactggcggcacgggtgaagctgccatgttcagccacggcaagaaaataattgatatgtcgagagagcattcgcaacctataagtaaatccaatggaactcatcataaatgagacttttaccttatgacaatcggcgagtagtctgcctctcattccagagacagacagaggttaacggtgaaagagattattgatggattccttaaattccagcgcgaggcatttccgaagcgggaagccttgtttaaacagctggcgacacagcaaagcccgcgcacactttttatctcctgctccgacagccgtctggtccctgagctggtgacgcaacgtgagcctggcgatctgttcgttattcgcaacgcgggcaatatcgtcccttcctacgggccggaacccggtggcgtttctgctagcgtggagtatgccgtcgctgcgcttcgggtatctgacattgtgatttgtggtcattccaactgtggcgcgatgaccgccattgccagctgtcagtgcatggaccatatgcctgccgtctcccactggctgcgttatgccgatagtgcccgcgtcgttaatgaggcgcgcccgcattccgatttaccgagtaaagctgcggcgatggtacgtgaaaacgtcattgctcagttggctaatttgcaaactcatccaagcgtgcgcctggcgctcgaagaggggcggatcgccctgcacggctgggtctacgacattgaaagcggcagcatcgcagcttttgacggcgcaacccgccagtttgtgccactggccgctaatcctcgcgtttgtgccataccgctacgccaaccgaccgcagcgtaaccttatttttaaaccatcaggagttccaccatgattcagagtcaaattaaccgcaatattcgtcttgatcttgccgatgccattttgctcagcaaagctaaaaaagatctcagttttgccgagattgccgacggcaccggtctggcagaagcctttgtaaccgcggctttgctgggtcagcaggcgcttcctgccgacgccgcccgcctggtcggggcgaagctggatctcgacgaagactccattctactgttgcagatgattccactgcgtggctgcattgatgaccgtattccaactgacccaacgatgtatcgtttctatgaaatgttgcaggtgtacggtacaaccctgaaagcgttggttcatgagaaatttggcgatggcattattagcgcgattaacttcaaactcgacgttaagaaagtggcggacccggaaggtggcgaacgtgcggtcatcaccttagatggtaaacatctgccgaccaaaccgttctgacagccatgcgcaaccatcaaaagacgttcacgatgctgctggtactggtgctgattggtcttaatatgcgaccactgctcacctccgtcgggccactgctaccgcaattgcgccaggcgagcggaatgagctttagcgtggctgccctgttgaccgctctgccggtggttaccatgggcgggctggcgctggccggaagctggcttcatcagcatgtcagcgaacgtcgcagtgtcgccatcagtctgttgctgattgccgtcggtgcattgatgcgtgagctttacccgcaaagtgcgctgctgcttagcagcgcactgcttggtggggtggggatcggcatcattcaggcggtgatgcctagcgtgattaaacggcggtttcagcagcgcacgccactggtgatggggctgtggtccgcggctctgatgggcggcggtgggcttggtgccgccataacgccctggttagttcaacatagcgaaacctggtatcaaacactcgcctggtgggcgctgcctgccgttgttgcgctctttgcctggtggtggcaaagcgcccgcgaggtcgcctcttcccacaagacaacaaccactccggttcgcgtggtattcactccccgcgcgtggacgctgggtgtttacttcggtctgattaacggcggttacgccagcctgattgcctggttacccgctttctatattgagattggtgccagcgcgcagtacagcggttccttactggcattgatgacgcttgggcaagccgcaggagctttgctgatgcctgctatggctcgccatcaggatcggcgcaaactgttaatgctggcgctggtgttacaactggtggggttctgcggctttatctggctgccgatgcaattgccggtattgtgggcgatggtgtgtgggttaggtctgggcggcgcgtttccgctctgtttgctgctggcgctcgatcactctgtgcaaccggctattgctggcaagctggtggcgtttatgcagggaatcggttttatcatcgccgggcttgccccgtggttttctggcgtgctgcgtagtatcagcggcaattacctgatggactgggcatttcatgcgctgtgcgtcgttgggctgatgatcataaccctgcgttttgcaccagtacgttttccgcagctgtgggtcaaagaggcatgatgcgacgcttgttcctgcgctttgttcatgccggatgcggctaatgtagatcgctgaacttgtaggcctgataagcgcagcgtatcaggcaatttttataatttaaacactgctttcaactttataatctttgaaataatagtgcttatcccggtcgtttatttcgcgaataacccgacaaggaacgccagccgccacgacgtttggtggaatgtcttttgtgacgatactacccgcgccaataacagaattatccccgatggtgacgcctggattaataaccacatgacttccgatccagacgttattgccaatcgttatcggaaaagagtacatctcgccgttttttctcaattcatggtgtacagggtgtcccgtaacggaaagagtaacgttgggtgcaatcagtacgttatcaccgattgttaccgtgtagtcatcgacaatggttaaattgaaatttgcataaaaattgcggcctatatggatgttggaaccgtaagagaaatagacaggcggttctacccaggcgttttcccctaccgtggcaaacatttctttaatcaggctttctcttttttcaacttcacttggatggctgtgattaaactcatacattaacgttttcccacgaagtcttttttccggtaagccttcgcacatatcggtaaatagcttgcctgctcttattctttcggtcattggcatgttcaatgcgatcactccgttatgatatgttggtcggataaggcgctcgcgccgcatccgacattgattgcttaagcgacttcattcacctgacgacgcagcagggaaagcgggccggggccgctaagcgtgaacacggaaattaaggtgaagcccagcgccaccagacccagcaccagataagcgccctggaaaccgatgctttcatacatattgcccgccagtacagacataaaaatcatcgccagttgcttaaagaagcagaaacagaccagataaatcgtcgcactaaaacgcacttcaaactggctggtaatatatttaaagcagcccaccagcaggaacggtacttcaaacatatgcagcgttttcagaataaccacttccagcgcactggtggcgaagctactgccaataatacgtacagacataatagtgccagccagcagcagggcgtttttcccaccgatgcgattaatgatcagtggcgcaaagaacataatgctggcgttaagtaattcgcccattgtcgttacgtagccaaatacccgcgtaccctgttcaccggtagcaaagaagctagtaaagaaattagcaaactgttggtcaaaaacatcgtaggtgcaggaaacgccaataacatacagactcaaaaaccacagttttggctgtctgaacagttccagtgccagcttaaggctaaatgcgctatggttggcacctaccgcattggcaaccgtggcagaagagggcgcatccgttttggcgaaaaagagtaaaacggcgaggatgagtgcacagccagagcccagccagaaaacaaactgattattgatggtgaacatgatgccgacaatgctggcacacagcgcccagccaacacagccaaacatccgcgcgcgaccaaattcgaaattactgcgacggctgactttctcaataaatgcctctactgctggcgcaccggcgttaaaacaaaagcctagataaataccaccaacaatgcttcctactaaaatgttgtattgtaacagtggcccgaagataaaaataaagaacggcgcaaacatcactaacatgccggtaataatccacagcaggtatttgcgcagcccgagtttgtcagaaagcagaccaaacagcggttggaataataggctgaacagagaaatagcggcaaaaataatacccgtatcacttttgctgatatggttgatgtcatgtagccaaatcgggaaaaacgggaagtaggctcccatgataaaaaagtaaaagaaaaagaataaaccgaacatccaaaagtttgtgttttttaaatagtacataatggatttccttacgcgaaatacgggcagacatggcctgcccggttattattatttttgacaccagaccaactggtaatggtagcgaccggcgctcagctggaattccgcgcttacactcgggctccaggagtcgtcgccaccaatccccatatggaaaccgtcgatattcagccatgtgccttcttccgcgtgcagcagatggcgatggctggtttccatcagttgctgttgactgtagcggctgatgttgaactggaagtcgccgcgccactggtgtgggccataattcaattcgcgcgtcccgcagcgcagaccgttttcgctcgggaagacgtacggggtatacatgtcactcaatggcagatcccagcggtcaaaacaggcggcagtaaggcggtcgggatagttttcttgcggccctaatccgagccagtttacccgctctgctacctgcgccagctggcagttcaggccaatccgcgccggatgcggtgtatcgctcgccacttcaacatcaacggtaatcgccatttgaccactaccatcaatccggtaggttttccggctgataaataaggttttcccctgatgctgccacgcgtgagcggtcgtaatcagcaccgcatcagcaagtgtatctgccgtgcactgcaacaacgctgcttcggcctggtaatggcccgccgccttccagcgttcgacccaggcgttagggtcaatgcgggtcgcttcacttacgccaatgtcgttatccagcggtgcacgggtgaactgatcgcgcagcggcgtcagcagttgttttttatcgccaatccacatctgactaagaaagccactctggcggttaaattgccaacgcttattacccagctcgatgcaaaaatccatttcgctggtggtcagatgcgggatggcgtgggacgcggcggggagcgtcacactgaggttttccgccagacgccactgctgccaggcgctgatgtgcccggcttcactccatgcggtcgcgttcggttgcactacgcgtactgtgagccagagttgcccggcgctctccggctgcggtagttcaggcagttcaatcaactgtttaccttgtggagcgacatccagaggcacttcaccgcttgccagcggcttaccatccagcgccaccatccagtgcaggagctcgttatcgctatgacggaacaggtattcgctggtcacttcgatggtttgcccggataaacggaactggaaaaactgctgctggtgttttgcttccgtcagcgctggatgcggcgtgcggtcggcaaagaccagaccgttcatacagaactggcgatcgttcggcgtatcgccaaaatcaccgccgtaagcgctccacgggttgccgttttcatcatatttaatcaggctctgatccacccagtcccagacgaagccgccctgtaaacggggatactgacgaaacgcctgccagtatttagcgaaaccgccaagactgttacccatcgcgtgggcgtattcgcaaaggatcagcgggcgcgtctctccaggtaggctaagccattttttgatggaccatttcggcacagccgggaagggctggtcttcatccacgcgcgcgtacatcgggcaaataatatcggtggccgtggtgtcggctccgccgccttcatactgcaccgggcgggaaggatcgacagatttgatccagcgatacagcgcgtcgtgattagcgccgtggccactttcattccccaggctccagatgatcacactcgggtgattacgatcgcgctgcaccattcgcgttacgcgttcgctcatcgccggtagccagcgcggatcatcggtcagacgattcattggcaccatgccgtgggtttcaatattggcttcatccaccacatacaggccgtagcggtcgcacagcgtgtaccacagcggatggttcggataatggctacagcgcacggcgttaaagttgttctgcttcatcagcaggatatcctgcaccatcgtctgctcatccatgacctgaccatgcagaggatgatgctcgtgacggttaacgcctcgaatcagcaacggcttgccgttcagcagcagcagaccattttcaatccgcacctcgcggaaaccgacatcgcaggcttctgcttcaatcagcgtgccgtcggcggtgtgcagttcaaccaccgcacgatagagattcgggatttcggcgctccacagtttcgggttttcgacgttcagacgtagtgtgacgcgatcggcataaccaccacgctcatcgataatttcaccgccgaaaggcgcggtgccgctggcgacctgcgtttcaccctgccataaagaaactgttacccgtaggtagtcacgcaactcgccgcacatctgaacttcagcctccagtacagcgcggctgaaatcatcattaaagcgagtggcaacatggaaatcgctgatttgtgtagtcggtttatgcagcaagctgacgtcacggaaaatgccgctcatccgccacatatcctgatcttccagataactgccgtcactccagcgcagcaccatcaccgcgaggcggttttctccggcgcgtaaaaatgcgctcaggtcaaattcagacggcaaacgactgtcctggccgtaaccgacccagcgcccgttgcaccacagatgaaacgcgctgttaacgccatcaaaaataattcgcgtctggccttcctgtagccagctttcatcaacattaaatgtgaggctgtaacaacccgtcggattctccgtgggaacaaacggcggattgaccgtaatgggataggtcacgttggtgtagatgggcgcatcgtaaccgtgcatctgccagttactggggacgacgacagtatcggcctcaggaagatcgcactccagccagctttccggcaccgcttctggtgccggaaaccaggcaaagcgccattcgccattcaggctgcgcaactgttgggaagggcgatcggtgcgggcctcttcgctattacgccagctggcgaaagggggatgtgctgcaaggcgattaagttgggtaacgccagggttttcccagtcacgacgttgtaaaacgacggccagactatccgtaatcatggtcatagctgtttcctgtgtgaaattgttatccgctcacaattccacacaacatacgagccggaagcataaagtgtaaagcctggggtgcctaatgagtgagctaactcacattaattgcgttgcgctcactgcccgctttccagtcgggaaacctgtcgtgccagctgcattaaactatcggccaacgcgcggggagaggcggtttgcgtattgggcgccagggtggtttttcttttcaccagactgacgggcaacagctgattgcccttcaccgcctggccctgagagagttgcagcaagcggtccacgctggtttgccccagcaggcgaaaatcctgtttgatggtggttaacggcgggatataacaactgctgtcttcggtatcgtcgtatcccactacgctgatatccgcaccaacgcgcagcccggactcggtaatggcgcgcattgcgcccagcgccatctgatcgttggcaaccagcatcgcagtgggaacgatgccctcattcagcatttgcatggtttgttgaaaaccggacatggcactccagtcgccttcccgttccgctatcggctgaatttgattgcgagtgagatatttatgccagccagccagacgcagacgcgcgctgacagaacttaatgggcccgctaacagcgcgatttgctggtgacccaatgcgaccagatgctccacgcccagtcgcgtaccgtcttcatgggagaaaataatactgttgatgggtgtctggtcagagacatcaagaaataacgccggaacattagtgcaggcagcttccacagcaatggcatcctggtcatccagcggatagttaatgatcagcccactgacgcgttgcgcgagaagattgtgcaccgccgctttacaggcttcgacgccgcttcgttctaccatgctcaccaccacgctggcacccagttgatcggcgcgagatttaatcgccgcgacaatttggctcggcgcgtgcagggccagactggaggtggcaacgccaatcagcaagctctgtttgcccgccagttgttgtgccacgcggttgggaatgtaattcagctccgccatcgccgcttccactttttcccgcgttttcgcagaaacgtggctggcctggttcaccacgcgggaaacggtctgataagagacaccggcatactctgcgacatcgtataacgttactggtttcacattcaccaccctgaattgactctcttccgggcgctatcatgccataccgcgaaaggttttgcgccattcgatggtgtcaacgtaaatgcatgccgcttcgccttccggccaccagaatagcctggctttcaaccccttcttcgatctgttttgctacccgttgtagcgccggaagatgcttttccgctgcctgttcaatggtcattgcgctcgccatatacaccagattcagacagccaatcacccgttgttcactgcgcagcggtacggcgatagaggcgatcttctcctcctgatcccagccgcggtagttctgtccgtaaccctctttgcgcgcgcgcgccagaatggcttccagctttaacggttcccgtgccagttgatagtcatcaccggggcgggaggctaacatttcgattaattccttgcggtcttgttccgggcaaaaggccagccaggtcaggccgctggcggttttcagaagcggcaaacgtcgcccgaccattgcccggtgaaaggataagcggctgaaacggtgagtggtttcgcgtaccaccattgcatcaacatccagcgtggacacatctgtcggccataccacttcgcgcaacagatcgcccagcagtggggccgccagtgcagaaatccactgttcgtcacgaaatccttcgcttaattgccgcactttgatggtcagtcgaaaactatcatcggaggggctacggcggacatatccctcttcctgcagcgtctccagcagtcgccgcacagtggtgcgatgcaggccgctgagttccgccagcagcccgacgctggcaccgccatcaagtttatttaacatatttaataacattagaccgcgggttaagccgcgcacggttttgtattccgtctgctcattgttctgcatattaatactcatttctatagttaaaacaacgtggtgcacctggtgcacattcgggcatgttttgattgtagcgctaaacacccttcctatactgagcgcacaataaaaaatcatttacatgtttttaacaaaataagttgcgctgtactgtgcgcgcaacgacattttgtccgagtcgtgaggtactgaaatggcaatacaacaccctgacatccagcctgctgttaaccatagcgttcaggtggcgatcgctggtgccggcccggttgggctgatgatggcgaactatctcggccagatgggcattgacgtgctggtggtggagaaactcgataagttgatcgactacccgcgtgcgattggtattgatgacgaggcgctgcgcaccatgcagagcgtcggcctggtcgatgatgttctgccgcacactacgccgtggcacgcgatgcgttttctcaccccgaaaggccgctgttttgctgatattcagccaatgaccgatgaatttggctggccgcgccgtaacgcctttattcagccgcaggtcgatgcggtgatgctggaaggggtgagccgttttccgaatgtgcgctgcttgttttcccgcgagctggaggccttcagtcagcaagatgacgaagtgaccttgcacctgaaaacggcagaagggcagcgggaaatagtcaaagcccagtggctggtagcctgtgacggtggagcaagttttgtccgtcgcactctgaatgtgccgtttgaaggtaaaactgcgccaaatcagtggattgtggtagatatcgccaacgatccgttaagtacgccgcatatctatttgtgttgcgatccggtgcgcccgtatgtttctgccgcgctgcctcatgcggtacgtcgctttgaatttatggtgatgccgggagaaaccgaagagcagctgcgtgagccgcaaaatatgcgcaagctgttaagcaaagtgctgcctaatccggacaatgttgaattgattcgccagcgtgtctacacccacaacgcgcgactggcgcaacgtttccgtattgatcgcgtactgctggcgggcgatgccgcgcacatcatgccggtatggcaggggcagggctataacagtggtatgcgcgacgcctttaacctcgcatggaaactggcgttggttatccaggggaaagcccgcgatgcgctgctcgatacctatcaacaagaacgtcgcgatcacgccaaagcgatgattgacctgtccgtgacggcgggcaacgtgctggctccgccgaaacgctggcagggtacgttacgtgacggcgtttcctggctgttgaattatctgccgccagtaaaacgctacttcctcgaaatgcgcttcaagccgatgccgcaatattacggcggtgcgctgatgcgtgagggcgaagcgaagcactctccggtcggcaagatgtttattcagccgaaagtcacgctggaaaacggcgacgtgacgctgctcgataacgcgatcggcgcgaacttcgcggtaattggctggggatgcaatccactgtgggggatgagcgacgagcaaatccagcagtggcgcgcgttgggcacacgcttcattcaggtggtgccggaagtgcaaattcataccgcacaggataaccacgacggcgtactacgcgtgggcgatacgcaaggtcgcctgcgtagctggttcgcgcaacacaatgctagcctggtggtgatgcgcccggatcgctttgttgccgccaccgccattccgcaaaccctgggcaagaccctgaataaactggcgagcgtgatgacgctgacccgccctgatgccgacgtttctgtcgaaaaggtagcctgatatgcacgcttatcttcactgtctttcccacagcccgctggtggggtatgtcgacccggcgcaagaggtgctcgatgaggtcaatggcgtgattgccagcgcccgcgagcgtattgcggcattctcccctgaactggtggtgctgtttgcgccagatcactacaacggctttttctatgacgtgatgccaccgttctgtttaggcgttggagcgacggcaattggtgatttcggcagtgcggcaggagagctgcccgtgcctgtggagctggcggaggcctgtgcgcatgccgtcatgaagagcgggatcgatcttgccgtttcttactgtatgcaggtggaccacgggttcgcccagccgctggagttcctgctcggtgggctggataaggtgccagttctgcctgtgttcatcaacggtgtcgccacgccgctgcccggtttccagcgtacccgcatgttgggtgaagccattggacgtttcaccagcactctcaataaacgcgtgctgttcctgggttccggtgggctttcccatcagccgccggtgcccgaactggcgaaagccgatgcccatatgcgcgaccgtctgttggggagcgggaaagatttacccgccagtgagcgcgaattgcgtcagcaacgggtgattagcgccgctgagaagtttgttgaggatcagagaacgctgcatccgctcaacccgatttgggataaccagttcatgactttgctggagcagggacgcatacaggaactggatgccgtcagtaacgaagagctttccgccattgccggaaagagcacacatgaaatcaaaacctgggtcgccgcttttgccgctatttctgcgtttggcaactggcgtagcgaagggcgttattaccgcccaatcccggagtggattgccggatttggcagcttaagcgccagaacagagaactgaatatgcaggagaagatgatgagttatcagccacaaaccgaagccgccaccagccgttttctgaatgtagaagaagcgggtaaaacgctgcgcatccattttaatgactgcggacaaggcgacgaaaccgttgtcctgctgcatggttccggcccgggtgctactggctgggcgaacttcagccgcaatatcgatccgctggtagaggcgggctatcgggtgatcctgctggattgtccgggttggggcaagagcgatagcgtcgttaatagtggtagccgaagcgatcttaatgcacgaatcctgaaaagcgtggtggatcaactggatatcgccaaaatccacctgctgggcaacagcatggggggccatagttctgtggcgttcacccttaaatggccggagcgcgtcggcaaactggtgctgatgggcggcggtacgggcggcatgagtttgtttacgccgatgccaaccgaaggtattaagcgactgaatcagctttatcgtcagccgactatcgaaaacctgaagctgatgatggatatcttcgtttttgataccagcgatttgaccgacgccctgtttgaagcgcgcctgaataatatgctgagccgccgcgatcacctggaaaacttcgttaagagcctggaagctaatccgaaacagttcccggattttggcccacgtctggcggaaatcaaagcgcaaaccctgattgtctgggggcgcaacgaccgctttgtgccgatggatgcgggtctgcgtctgctgtccggcattgccggttctgaactgcatatcttccgcgactgtggtcactgggcgcagtgggaacatgccgacgctttcaatcaactggtgctgaatttcctcgcacgcccttaaggaatggtcatgacgaagcatactcttgagcaactggcggcggatttacgccgcgccgcagagcagggcgaagcgattgcaccgctgcgcgatctgattggtatcgataacgctgaagcggcttacgccattcagcacataaatgtgcaacatgacgttgcgcaggggcgtcgcgtggtagggcgtaaagtgggcctgacacatccgaaagtgcaacaacaactgggcgttgatcaaccggattttgggacgttatttgccgacatgtgttatggcgataacgaaatcattcctttttcccgtgttctgcaaccccgcattgaagcggagatcgcactggtgttgaaccgcgatttgcccgcaaccgatatcaccttcgacgaattgtataacgccattgaatgggtacttccggcgctggaagtggtggggagccgcattcgcgactggagcattcagtttgtcgataccgtggcagataacgcctcctgtggggtgtatgtcatcggcggtccggcgcaacgtccggcggggttagacctgaaaaactgcgccatgaagatgacgcgtaataacgaagaggtttctagcgggcgcggcagcgaatgcctgggacatccgcttaatgcggccgtctggctggcacgcaaaatggccagtctgggtgaaccgctgcgcaccggagatatcattcttaccggggcattaggtccgatggtggcggtgaatgcgggcgatcgttttgaagcccatattgaaggcataggtagtgttgctgcgacatttagtagcgcagccccaaaaggaagtctgagttgagctaagccccaaaaggaagtctgtcatgagtaagcgtaaagtcgccattatcggttctggcaacattggtaccgatctgatgattaaaattttgcgtcacggtcagcatctggagatggcggtgatggttggcattgatcctcagtccgacggtctggcgcgcgccagacgtatgggcgtcgccaccacccatgaaggggtgatcggactgatgaacatgcctgaatttgctgatatcgacattgtatttgatgcgaccagcgccggtgctcatgtgaaaaacgatgccgctttacgcgaagcgaaaccggatattcgcttaattgacctgacgcctgctgccatcggcccttactgcgtgccggtggttaacctcgaggcgaacgtcgatcaactgaacgtcaacatggtcacctgcggcggccaggccaccattccaatggtggcggcagttagtcgcgtggcgcgtgttcattacgccgaaattatcgcttctatcgccagtaaatctgccggacctggcacgcgtgccaatatcgatgaatttacggaaaccacttcccgagccattgaagtggtgggcggcgcggcaaaagggaaggcgattattgtgcttaacccagcagagccaccgttgatgatgcgtgacacggtgtatgtattgagcgacgaagctagtcaagatgatatcgaagccagtatcaatgaaatggctgaggcggtgcaggcttacgtaccgggttatcgcctgaaacagcgcgtgcagtttgaagttatcccgcaggataaaccggtcaatttaccgggcgtggggcaattctccggactgaaaacagcggtctggctggaagtcgaaggcgcagcgcattatctgcctgcctatgcgggcaacctcgacattatgacttccagtgcgctggcgacagcggaaaaaatggcccagagtctggcgcgcaaggcaggagaagcggcatgaacggtaaaaaactttatatcagcgacgtcacattgcgtgacggtatgcacgccattcgtcatcagtatagcctggaaaacgttcgccagattgccaaagcactggacgatgcccgcgtggatagcattgaagtggcccacggcgacggtttgcaaggttccagctttaactatggtttcggcgcacatagcgaccttgaatggattgaagcggcggcggatgtggtgaagcacgccaaaatcgcgacgttgttgctgccaggaatcggcactattcacgatctgaaaaatgcctggcaggctggcgcgcgggtggttcgtgtggcaacgcactgtaccgaagctgatgtttccgcccagcatattcagtatgcccgcgagctcggaatggacaccgttggttttctgatgatgagccatatgaccacgccggagaatctcgccaagcaggcaaagctgatggaaggctacggtgcgacctgtatttatgtggtggattctggcggtgcgatgaacatgagcgatatccgtgaccgtttccgcgccctgaaagcagagctgaaaccagaaacgcaaactggcatgcacgctcaccataacctgagtcttggcgtggcgaactctatcgcggcggtggaagagggctgcgaccgaatcgacgccagcctcgcgggaatgggcgcgggcgcaggtaacgcaccgctggaagtgtttattgccgccgcggataaactgggctggcagcatgggaccgatctctatgcgttaatggatgccgccgacgacctggtgcgtccgttgcaggatcgaccggtacgagtcgatcgcgaaacgctggcgctgggatacgctggtgtttacagcagcttcctgcgtcactgtgaaacggcggcggcgcgttatggcttaagtgcggtggatattctcgttgagctgggcaaacgccggatggttggcggccaggaggatatgatcgttgacgtggcgctggatctgcgcaacaacaaataatgatgactgccgagaacgtgcattttgtatgcccatcccagcacgactgccggatgcggcgtgaacgccttatccggcctacggatggcgtgagaatttgtaggtctgataagacgcgttagcgtcgcatcaggcatctgcgcacgactgccggatgcggcgtgaacgccttatccggcctacggatggcgcgggaatttgtaggcctgataagacgcgttagcgtcgcatcaggcatctgcgcacgactgccggatgcggcgtgaacgccttatccggcctacgggtggcgcgagaatttgtaggcctgataagacgcgttagcgtcgcatcaggcatctgcgcacgactgccggatgcggcgtaaacgccttatccggcctacggatggcgcgggaatttgtaggcctgataagacgcgttagcgtcgcatcaggcatctgcacacgactgccggatgcgataaacgtcttgtccggcctacatttcgcccgtaggcagtcattaaatagttctgattacgcggctggcaatgtatcagtcgcgattcacctgcactcgcaacgaggttcatcttatgagcactcgtacccctagtagttctagttcccgcctgatgctgaccatcgggctttgttttttggtcgctctgatggaagggctggatcttcaggcggctggcattgcggcgggtggcatcgcccaggctttcgcactcgataaaatgcaaatgggctggatatttagcgccggaatactcggtttgctacccggcgcgttggttggcggaatgctggcggaccgttatggtcgcaagcgcattttgattggcagtgttgcgctgtttggtttgttcagtctggcaacggcgattgcctgggatttccccagtctggtctttgcgcggctgatgaccggtgtcgggctgggggcggcgttgccgaatcttatcgccctgacgtctgaagccgcgggtccacgttttcgtgggacggcagtgagcctgatgtattgcggtgttcccattggcgcggcgctggcggcgacactgggtttcgcgggggcaaacttagcatggcaaacggtgttttgggtaggtggtgtggtgccgttgattctggtgccgctattaatgcgctggctgccggagagcgcggttttcgctggcgaaaaacagtctgcgccaccactgcgtgccttatttgcgccagaaacggcaaccgcgacgctgctgctgtggttgtgttatttcttcactctgctggtggtctacatgttgatcaactggctaccgctacttttggtggagcaaggattccagccaagccaggcggcaggggtgatgtttgccctgcaaatgggggcggcaagcgggacgttaatgttgggcgcattgatggataagctgcgtccagtaaccatgagcctactgatttatagcggcatgttagctagcctgctggcgcttggaacggtgagcagttttaacggtatgttgctggcgggatttgtcgcggggttgtttgcgacaggtgggcaaagcgttttgtatgccctggcaccgttgttttacagtagccagatccgcgcaacaggtgtgggaacagccgtggcggtagggcgtctgggggctatgagcggtccgttactggccgggaaaatgctggcattaggcactggcacggtcggcgtaatggccgcttctgcaccgggtattcttgttgctgggttggcggtgtttattttgatgagccggagaagtcgaatacagccgtgcgccgatgcctgacgtgccttattaggcaggggcgaaagggacttcaccccaatacacctacggcgtttacaggtatactcgctaaaaattattcagcgggtttggaaacaaagatggcaaaacttaccttacaagagcagttgctcaaagcaggattagtcaccagcaaaaaagcggcgaaggtggagagaacggcgaaaaaaagccgcgttcaggcgcgtgaagctcgggcggcggtagaagaaaataaaaaggcacagcttgagcgtgataaacagcttagcgaacagcaaaaacaagcggcgttggcgaaagaatataaagctcaggtgaagcagcttattgaaatgaaccgaatcaccattgccaatggcgatattggttttaacttcactgacggcaatctgattaagaagatttttgtcgataagctcacacaggcgcagttgattaatggtcgtctggcgattgcccgcttgttggtcgataacaatagcgaaggtgaatacgccattattcccgccagcgttgccgataaaattgctcagcgcgatgccagcagtatagtgttgcacagcgcgctcagcgccgaagagcaggatgaagacgacccgtatgccgacttcaaagtgcctgatgatttgatgtggtaaacatagataagtcgtgcgcagatgcctgatgcgacgctatgcgcgtcttatcaggcctacggtttatgggcgaagtgtagaccggataaggcgttcacgccgcatccggcagtcgtgcgccatgcctgatgcgacgctttgcgcgtcttatcaggcctacggcttacgggcgaagtgtaggccggataaggcgttcacgccgcatccggcagtcgtgctattatcaacgcatattcagtttattggcgtggtaggcaatatgctcgccaataaaactggagacaaaataatagctgtgatcataaccctcgtgataacggattaacgtcttgatattcatctcctggcagatcttttcaagatttggagtccgcagctgttctgcgtaaaaatcatcactcaacccctgatcaaccatgatttccgcaacgcgttgaccttgactaataagactcaccgggtcgtaatccaaccaggcatctttattttcagcaagatatgcagcaaaggcttgctgtccccacggcacttggcttggggagacaatggggctaaacgcgctgacgctgacatattcatctgggttacgtaacgccagcaccagcgcgcccagcccgcccatagaatgaccagagatagactttttggccgttgccggaaaatgatgcatcactaaatccggcagctcgttgcggatatagtcatacattttgtaatgttcattccacggcgcttgcgtcgcgttcaggtaaaacccggcaccttgcccgagatcgtaacggtcagcatctgcgacatgactgcctcgcggactggtgtccggcgcaacaacaataatgttgtgctcagccgcgtaacgctgcatcccgcttttagtaatgaaattctgctcgttgcaggtcaggccactaagccagtacagcaccggcaatttttcattcgcggcttttggtgggagatagacgccgacattcatttcacatttcagactttgggaataatgccgatacatattttgccagccgccaaagctgacatgtttttcaatgagttccatcagtcattatctcagggttaatcccccggacggctgcccggggagagtattaagaacccccgcctgaagtggacggggtaaacctgcgggaaatcagtaacgaattacggttcgaatggatttgccttcatgcatcaggtcgaaggcgtcattaatttcatccaggctcatggtatgcgtgacaaacggttccagatcgatatcacctttcatcgcatcttcaaccatgcccggtaactgggaacgacctttcacgccgccaaacgcggaacctttccatacgcgaccagtgaccaactggaatggacgggtggagatttcctgaccggcaaccgcgaccccgatgatcacgctctgaccccagccgcggtgcgcactttccagcgccgcacgcatcacgttgacgttaccgatgcattcaaaggtatggtcgataccccatttgttgatatccaacaggacatcttttatcggtttgtcgtagtcattcgggttaatgcagtcggtagcaccgaagcgacgcgccagatcgaatttcttcgggttggtatcgatagcgataatccgacccgctttcgcctgacgcgcgccctgaaccactgccagaccaatcgcgccaagaccaaacacggcaacagaatcacctggctggactttagctgtgttgtgtaccgcgccaataccggtggtcacgccacagcccagcaggcagacgtgttcatggtttgcttctggattaatttttgccagagacacttccgcgactacggtgtattcactgaatgtagagcaccccatgtagtgataaagcggctgcccgttgtaagaaaaacgggtggtgccgtctggcatcaggcctttaccctgggtttcgcgaaccgcaacacagaggttagttttgccagaacgacagaactcacactcgccgcactccgcggtgtaaagcgggatcacatggtcgccaggtttgacgctggttacgccttcaccgacttcaaccacaacgccggccccttcgtgaccgagaaccaccgggaatacaccttccgggtcatcgccggagagggtaaatgcgtcggtatggcaaacgccggtatgggtgactttaattagcacttcaccttttttcggtggtgcaacgtcaatttcaacgatttccagcggtttaccgggagcaaatgcaacggcagcacgacttttcatctctcgctcttcctcaatatggtaatagattcagttatttaagataggcacgaaccagttcaatagtgtcgtcaacggattggctgacttcgcggctgtagcagtcatttcggtcaaacgtttcccggatatggctttcaagcacttctgccatcagcccattagccgcgccccgaacggcagcgatctgttggagtatggcacggcattcggcatcaccctccaggctccgttccagagcatcaatctgcccccgaatacgacgaactcgagtaaggacctttttcttctcttccggagtactgggcatttcgcacctcatcatctgcatgcaatatactataggggggtattctatatgtcaatgcatacccccctatagtatataacactggagaataaaatttatccggtgaatgtggtcggaaaacaaagaggaaaggggggggggctaatcggcagggaaggccgccccggatagcgggcggcagaaggaatcagaatttccaggtcagacgggctgcaagttgcagaccgttacgagatggacggtcccctcgcccccttggggagagggttagggtgagggggcgttcaccgtactttcaacaggttaactccccctttctgagaggaaacaaaattaacgcagaatcttcttctcagccaaatccagcgcaaagtagctgaaaatcagatccgcacccgcacgcttaatgctacctaagctttcgagcacgactttctcttcatctatagcacccgccagcgcggcgaacttaatcatcgcatactcaccgctcacctgatacgcgccaatcggcaattcagtacgttcacgcagctcacgcacgatgtcgaggtacgctccagcaggtttaaccatcaggcagtctgcgccctgggcttcatccagcagactttcacgaatcgcctcacgacggttcattgggttcatctgatagcttttgcggtcgccttttaatgcgcttccggcagcttcacggaacgggccataaaaggaggaggcgaacttggtgctatagctcataatcgccgtatctttaaatcccgcagcgtccagcgcctgacgaatcgcctgtacctggccgtccatcgcggcggaaggggcgatgaagtctgcacctgcagcagctgcaaccacggcttgcttgcctaaattttccagagtcgcgtcgttgtcgacgccatgctcgcacagcacaccgcagtgaccgtgagaagtgtattcacagaagcaggtgtcactcataacgatcatttctggcacggtctgcttgcagatgcggctcatacgcgccaccagtccatcttcccgccaggcatcgctgccggtttcatcggtatggtgagagatgccaaaagtcatcacggaacgaataccggcgttggcgatgcgttcaatttcgcgtgccagatgtttctctggaatgcgcatcacgcctggcatggcttcaacggctttgtagtcgtcaatttcttcttcaacaaagatcggcaacaccaggtcgttaaggctaagtgttgtctcttcaaacatagcgcgcagcgcaggagatttgcgcaggcgacgagggcgttggattaagtctgtcatggtctgcctgatgtttgtggaatcgaggggcatagtatacctgaagcagggtagggatgttttacgaaagttgtcgcgatgttgacaagaagagaatggaagagaggccaggacatctttttaatagaaacagcaataattttatattcactgaaaatatttttaatcttgaatattatcgggcgttaaaatattacattgtggttttcaatgcgttatccgcagcgtgacgctccagcgccagttcaatcaaacgtgtgatcagatcggtgtaacccagaccgctggcttgccacagcttcggatacatactgatattagtgaagccaggcagggtgttgatctcgttgatcaccacttcgttctctggggttaaaaacacgtctacacgcgccatgcctgcgcatcccaacgtttgataagcctgaacggcaatcgcccggatcttatcgttgatttctggcgcaatggctgccggaactaccactttcgcgccatcttcgtcaatgtacttggtgtcgtaggcatagaaatcgctggtgagtacgatctctccacaggtgctggcttgcggattgtcgttgcccagaactgcgcattcgatctcacgacctttgatcccttgctcaacgatcactttatgatcgaactcgaacgccagatcgacggcaattgcgtactgttcttcactggttactttgctgacaccaacagaagagccctgattagccggttttacaaacagtggtaaccccagtttagactccacttcggcaaaactaatgttgtgacgattggcgcgcgtcagggtaataaatggcgcaatgttcagcccggcatcgcgtagcagacgtttggtgacatctttgtccatacaggctgcactagccagaacatcagaacctacaaacggtaaattggcgacccgcagcattccctgcaaggaaccatcttcgcccagcgtaccgtggacaatcgggaaaatgacatccaccgtcggcaacggctgaccgttttgcgcgtcgataagctgatgctcatgtttacctggcacctgcgcaaggctggtcgcgctagggcgcaacgcaatatgggcaggatcgtctgcatttagcagataattgctggcatcgctgacgtgccattgcccttgtttatcaatgcccagcagcacaacgtcgaagcgacttttatcaatggcatcgacaatgttttttgcgctttgcagagacacttcatgttccgcacttttaccaccaaaaacgattcctacccgcagtttttccatcttaaaaacctatcccgtctaacacaaagtgcatacattaccacgacaaaacgggggattcgcggccttctgaaagattgttgcaatcttctgctgacaaagcgtgcaacgtactggtgaagaaagtgcgttatctcaaagatgtgcgcaagatcacaaaaatgatgaacgggaagctaatttattcctggcttaaatggccatgcggtgagtttttttctcttaattataagttaacgaagagaatatatttcataacttttatttataataaaggttgataattaaaagcctatattttgtgtgggtaattatttaaataagagaaacgtttcgctggtaatcaaacaaaaaatatttgcgcaaagtatttcctttgtcataaaaataatacttccagacactatgaagttgtgaaacataatgttaacttctccatactttggataaggaaatacagacatgaaaaatctcattgctgagttgttatttaagcttgcccaaaaagaagaagagagcaaagaactgtgtgcgcaggtagaagctttggagattatcgtcactgcaatgcttcgcaatatggcgcaaaatgaccaacagcggttgattgatcaggtagagggggcgctgtacgaggtaaagcccgatgccagcattcctgacgacgatacggagctgctgcgcgattacgtaaagaagttattgaagcatcctcgtcagtaaaaagttaatcttttcaacagctgtcataaagttgtcacggccgagacttatagtcgctttgtttttattttttaatgtatttgtacatggagaaaataaagtgaaacaaagcactattgcactggcactcttaccgttactgtttacccctgtgacaaaagcccggacaccagaaatgcctgttctggaaaaccgggctgctcagggcgatattactgcacccggcggtgctcgccgtttaacgggtgatcagactgccgctctgcgtgattctcttagcgataaacctgcaaaaaatattattttgctgattggcgatgggatgggggacagcgaaattactgccgcacgtaattatgccgaaggtgcgggcggcttttttaaaggtatagatgccttaccgcttaccgggcaatacactcactatgcgctgaataaaaaaaccggcaaaccggactacgtcaccgacagcgctgcaagtgcaaccgcctggagtaccggtgtcaaaacctataacggcgcgctgggcgtcgatattcacgaaaaagatcacccaacgattctggaaatggcaaaagccgcaggtctggcgaccggtaacgtttctaccgcagagttgcaggatgccacgcccgctgcgctggtggcacatgtgaccagccgcaaatgctacggtccgagcgcgaccagtgaaaaatgtccgggtaacgctctggaaaaaggcggaaaaggaagcattaccgaacagctgcttaacgctcgtgccgacgttacgcttggcggcggcgcaaaaacctttgctgaaacggcaaccgctggtgaatggcagggaaaaacgctgcgtgaacaggcacaggcgcgtggttatcagttggtgagcgatgctgccagtctgaatagcgtgacggaagcgaatcagcaaaaacccctgcttggcctgtttgctgacggcaatatgccagtgcgctggctaggaccgaaagcaacgtaccatggcaatatcgataagcccgcagtcacctgtacgccaaatccgcaacgtaatgacagtgtaccaaccctggcgcagatgaccgacaaagccattgaattgttgagtaaaaatgagaaaggctttttcctgcaagttgaaggtgcgagtatcgataaacaggatcatgctgcgaatccttgtgggcaaattggcgagacggtcgatctcgatgaagccgtacaacgggcgctggaattcgctaaaaaggagggtaacacgctggtcatagtcaccgctgatcacgcccacgccagccagattgttgcgccggataccaaagctccgggcctcacccaggcgctaaataccaaagatggcgcagtgatggtgatgagttacgggaactccgaagaggatagtcaagaacataccggcagtcagttgcgtattgcggcgtatggcccgcatgccgccaatgttgttggactgaccgaccagaccgatctcttctacaccatgaaagccgctctggggctgaaataaaaccgcgcccggcagtgaattttcgctgccgggtggtttttttgctgttagcaaccagacttaatggcagatcacgggcgcatacgctcatggttaaaacatgaagagggatggtgctatgaaaataacattactggttaccttgcttttcggtctggtttttttaaccaccgtcggcgctgccgagagaactttaaccccacaacaacagcgtatgacctcctgtaatcagcaggcgacggcgcaggcgttgaaaggggatgctcgtaagacctacatgagtgattgcctgaagaacagcaagtctgcgcctggcgaaaaaagtttgacgccacagcagcaaaagatgcgcgaatgcaataatcaagcaacacaacaatctctgaaaggtgatgatcgtaataagtttatgagtgcctgcctcaagaaagccgcctgatacctgatagtgctaacgggtgagctacgaaaatggctcacccgaaatatcatacttctgcctttagctccgtctctataatttgggaaaattgtttctgaatgttcccaaaaataatgaatgatgaaaactttttcaaaaaagcggcggcgcacggggaggaacctcctttaactcctcaaaacgaacatcagcggtccgggctgcgcttcgcccgtcgcgtcagactaccccgtgcggttggcctggctggcatgttcttaccgattgctagtacgctggttagtcacccgccgccgggctggtggtggctggtgttggtcggctgggcgttcgtctggccgcatttagcctggcagatagcgagcagggccgtcgatccgcttagccgggaaatttacaacttaaaaaccgatgcagtattagcgggaatgtgggtaggcgtaatgggcgtaaacgtgctgccttccaccgcgatgttgatgattatgtgtctgaatttgatgggggcaggcggcccccgtctgtttgtcgcgggtctggtgttgatggtggtttcctgccttgtcaccctcgagctgacgggcattaccgtgagcttcaatagtgcgccgctggaatggtggctctcccttcccattattgtcatttatcctctgctgtttggctgggtcagctaccagacggcaaccaaactggcggaacataaacgcaggttgcaggtcatgagtacccgcgacggcatgacgggcgtgtataaccgacgtcattgggaaactatgttacgcaatgaatttgataactgtcggcggcataatcgcgatgcaacgttactgattatcgatatcgaccatttcaagagcatcaacgatacctggggccatgatgtgggcgatgaagcgattgtggcgcttacccgacagttacaaattaccctgcgcggtagcgatgtgattggtcggtttggcggcgatgagtttgcagtaatcatgtccggtacgccagctgagagcgccattaccgccatgttacgggtgcatgaagggctaaatacattacgtttgccgaatacgccacaggtaactttacggattagtgtgggggttgcgccgctgaacccacaaatgagtcactatcgtgagtggttgaaaagcgcagatttggcgctttacaaagcaaagaaagccggacgtaaccgcaccgaagtggcggcctgacgtccggcgaaagtcatcaggatttgctgagtttttcacttttttccatacacttcgtcatcgcttcgatcactgcagcacggaagcctttctcttccagtacgcgtaccgcttcaatggtggtgcctcccggactgcagaccatatctttcagtgcccccggatgttctcccgtttccagcaccatttttgcggaacccattaccgcctgagcggcaaatttatacgcctgggcgcgtggcatcccgcccagcacggcggcgtcggccatcgcttcgataaacataaatacgtaggctgggctagaaccgctcacaccgaccaccgggtggatcatcggctcagcaattacttccgcttcgccaaagcagcggaaaatattcagcacatcagcggtatcttctggggttaccagcgcgtttggcgttacggaggtcatcccggcattaaccagtgcgggagtgttcggcatggcgcggataattttccggtcatggcccagcgcgcgggcaagctggtcgagcgtgacacctgcagcaatagaaacgaccagagagtctttattcaggctggaggtgatttcgctaagcactttaatcatgatgccaggtttaacggcagcaaaaatgatgtcggcgatttgcgccacttcttgcgcgctttctgcggcgttgatgccgaactggtcatgcagggcggcgactttatccggggagggggtgtatacccagatttgccctggaagcacctgaccgctggcaatcagaccgccgagaatggcttttcccatattgccgcagccaataaaaccgattttcttttccattgcctcactcctgccgtgaaattcattgttttgataatcgctggcagaagcataaacagaactatgccggaaggcaaaagcgcgacacaatagaggattacccaacaaaggatgactttatgacaatttgggtggatgccgacgcgtgtcccaatgtaattaaagagattttgtatcgcgcggcggaacgtatgcagatgccgctggtactggtagcaaaccagagtttacgcgtgccgccaagccgatttattcgtacgctgcgcgtcgcggcaggtttcgacgttgccgataacgaaattgtccggcagtgtgaagcgggcgatttggtgatcaccgcagatatacctttggctgctgaagccatcgagaaaggcgctgcggcgcttaatccgcgcggcgaacgttacacgccagcgaccattcgtgagcgcctgacgatgcgcgattttatggataccttacgtgccagtgggatccagaccggcggaccagatagccttagtcaacgtgaccgccaggcctttgccgcggagctggagaagtggtggctggaagtgcaacgtagtcgtggctaaatgtaatttattatttacacttcattcttgaatatttattggtatagtaaggggtgtattgagattttcactttaagtggaattttttctttacaatcgaaattgtactagtttgatggtatgatcgctattctcatgacaccggctttcgccgcattgcgacctattggggaaaacccacgatgacacaacctctttttctgatcgggcctcggggctgtggtaaaacaacggtcggaatggcccttgccgatagccttaaccgtcggtttgtcgataccgatcagtggttgcaaagtcagctcaatatgacggtcgcggagatcgtcgaaagggaagagtgggcgggatttcgcgccagagaaacggcggcgctggaagcggtaactgcgccatccaccgttatcgctacaggcggcggcattattctgacggaatttaatcgtcacttcatgcaaaataacgggatcgtggtttatttgtgtgcgccagtaagtgtcctggttaaccgactgcaagctgcaccggaagaagatttacggccaaccttaacgggaaaaccgctgagcgaagaagttcaggaagtgctggaagaacgcgatgcgctatatcgcgaagttgcgcatattatcatcgacgcaacaaacgaacccagccaggtgatttctgaaattcgcagcgccctggcacagacgatcaattgttgattttcgagcgcctatacttaacgttcatcccgtgaaataaggaagaacgatgccaacgaaaccgccttatcctcgtgaagcatatatagtgacgattgaaaaaggaaagccaggacagacggtaacctggtaccaactcagagccgatcatcctaaaccagacagcttgatcagtgaacatccgaccgctcaggaagcgatggatgcgaaaaaacgctatgaggaccctgacaaagagtgaccgcatcagactgctcggaagggattctgagtgccactacaagggatctgcgtcacatttttcataattcatgtttttctaataattagaatattaaacaataacaatccattactggaatcatttggaatctttacattatgccgtgcacgtctgctgctacgctttttgtcatttgtagcacaagtaagtgtcagcagtggtgcttcacacttgcccggtaattaacgacgaaagaaaagtaaggtggatgaacaatgagtgcgagcttggcgatcctgaccatcggcattgtacctatgcaggaagttttgccgctcctgacggaatacattgacgaagataatatttcccatcatagcctgctggggaagttaagtcgtgaagaagtgatggcggagtacgcgccagaagcaggcgaagacaccattctcacattattaaatgacaaccagctggcccatgttagccgtcgcaaagtggagcgtgacctgcaaggtgtggttgaagtgctcgataatcagggttatgacgtcattttattaatgagtacagcaaacattagtagtatgactgcgcgtaatacgatctttcttgagccgagccgaatattgcctccactggtttcctctattgttgaagatcatcaggtgggggttatcgttccggttgaggagatgctgcccgttcaggcgcaaaaatggcaaattttgcagaaaagcccggtatttagtttgggtaaccccattcatgatagtgaacaaaaaatcattgatgccgggaaagaattactggcaaaaggggctgatgtcatcatgctggattgtttaggatttcaccaacgtcatcgcgatttactgcaaaaacagctcgatgttcctgtcttgctgtctaacgtattgattgcacggctggctgcggaattactggtgtaattttgcgtgacagccagcgcctctggcccctatagtgaagtagatgttcaactaccaaacagggccagtttatgcttcaaagtaatgagtacttttccggcaaagtgaaaagtatcggcttttccagcagcagcactggtcgcgccagcgtgggtgttatggttgaaggcgaatacaccttcagcaccgctgagccggaagagatgacggtaatcagtggcgcgctgaatgtgttactgcctgacgcgaccgactggcaggtgtatgaagccggtagcgtgtttaatgttcccggtcacagtgagtttcatctgcaagttgccgaacccacctcttatctgtgccgctatctgtaattcctcgccttccccttgaacgggagggcatttttctgaaatatcctttctttagcccataataatatttcctttgctgcgattttttcaatttccgatatattcataatttatcaaggttgatataaatatcagtgaagatctccagatattgttgcggaactggctacgataaaagataaatcagatgatgaatggtggcgtgcattgctgcaaagtcgcaatgatcatttacgccaaacggcattgcgcaacgcacataccccggcgttgttgttaacgacattgactgagcctcaggatcggagcctggctattaataatccacagctggctgccgatgtgaaaacggcgtggttaaaagaggatccaagtttactcttatttgtcgaacaacccgatcttagcctgttacgtgatttagtgaaaaccggggcaacgcggaaaattcgcagtgaagcgcgtcaccggcttgaggaaaaacaatgacacaacgtccatggagcaagttacagcgtaaaacgcataatattgctgcgctaaaaattattgctcgccgtagcgaataattatatgcctggtgtggcttcgtacgccggataagacgcggcaggcgtcgcatccggcattaaaggaaaatcagcaattaacgttgtgcttcgccacctaatccttcaatcaggttttgaattaacgctgccagttcaccagtcatcaggatgaaatcggcatcaaaacgctgggcgaaatcttcacggtcgatatcttcgttttgatcgcgcagctcgtcgcagaacttcagacgcttgaggctaccatcgtcgcacatcacaaactgaatgcgctgctgccagtcgagcgccagtttagtcaccacttttccggcttcaatgtgattggtgatctcttcgctggtcagatcttgtttcttcgcgcggatcacgccgccatcttccagcaagcttttcagctcggcttcatcaagcagctggaagccctgtgccgcactaccggagcgaacccattcggtcagcgtcagttcaatcgggttttccatgctcaatggtacaaccggtaagctccccaggcttttacgcagtaatgccagcgtatcttccgcttttttggcactggcgcagtccaccataatcaaaccgttaaccgtgtcgatccacatcattgtctggctaaaacggctgaaagcacgcggcagcagagagtgcagcacttcgtctttcaggctatctttttcggttttcttcagcttacgcgcctgttccgcttccagtttggcgattttcgcttccagcgcctgtttaatcaccggagacgggaggattttttcttctttgcgcgcgcagataacaatttgaccattggcaacgtgcgttaacgcatcgctgtggcttcccatcggaggaacccagcccatcttcgccatgtcctggctgccgcatggggtaaatgccatgctggctagctgtttttccatctcttctgcacgcaggctaatctcgcggctaagacggtaaaccattaaatttttgaaccacagcatgataatttccacggccttgtcgttaaatttagcgggcatgataacgaattgtcggcggccttgcattgccaatccggttgtccgtctctacgctattgatattgaaaaaaataaggagagtaccgtgcgtataggtatcgatttaggcggcaccaaaactgaagtgattgcactgggcgatgcaggggagcagttgtaccgccatcgtctgcccacgccgcgtgatgattaccggcagactattgaaacgatcgccacgttggttgatatggcggagcaggcgacggggcagcgcggaacggtaggtatgggcattcctggcagtattagcccttacaccggtgtggtgaagaatgccaatagtacctggctcaacggtcagccattcgataaagacttaagcgcgaggttgcagcgggaagtgcggctggcaaatgacgctaactgtctggcggttagtgaagcagtagatggcgcggcagcgggagcgcagacggtatttgccgtgattatcggcacgggatgcggcgcgggcgtggcattcaatgggcgggcgcatatcggcggcaatggcacggcaggtgagtggggacacaatccgctaccgtggatggacgaagacgaactgcgttatcgcgaggaagtcccttgttattgcggtaaacaaggttgtattgaaacctttattagcggcacgggattcgcgatggattatcgtcgtttgagcggacatgcgctgaaaggcagtgaaattatccgcctggttgaagaaagcgatccggtagcggaactggcattgcgtcgctacgagctgcggctggcaaaaagcctggcacatgtcgtgaatattctcgatccggatgtgattgtcctggggggcgggatgagcaatgtagaccgtttatatcaaacggttgggcagttgattaaacaatttgtcttcggcggcgaatgtgaaacgccggtgcgtaaggcgaagcacggtgattccagcggcgtacgcggcgctgcgtggttatggccacaagagtaaaaaacgtaggcaattggcgcatcatgcctgatgcgacgcttgccgcgtcttatcaggcctacaaaaggtgccagaaccgtaggccggataaggcgttcacgccgcatccggcaataagtgctccgatgcctgatgcgacgcttgccgcgtcttatcaggcctgcaaaatgtgccagaaccgcgtagggcggataaggcgttcacgccgcatccggcaataagtaatgagcaccgagactataacttaccccagtggtttcgccagcaccggagtatccgccgcttgctggcgcttatagcgaccatacagcagcaagctgctcatcgcagcaaagctaagcagggcggcaggcagcgccacgtaattatatgccagccccagcgtcagcatcatacctccgcaatatgcgccgacggcgctaccgaggttaaacgctatttgcccacctgcggcacctaataactctccgcctttggcgttttgtagtaacaatatttgtagcggtgcactaagggcaaataatcccgcgcaacaaataaaagcaaaaataaggctcgttgttttcatgccgccgcagaaaaagagcatcagcagtgccagtacaattataaagtcagttactgctgcaatgcgcagtggactataacgtccactaatcctgccacttagcatatttcccagcaccatccctagcccaactaacatcataataaaggtcatcgccgtttcgctaaaaccggaaataaacatcatgtatggctttacgtagctgaaccaggcaaacacacctgcgttgccaaacatcgtggcggcgaaaattaaccacggggccgggctgcgcaaaaagtgaaattgttcgcgcagatttcctttcgcctcgtcgcgaatatctggcacccaaaaatagacgcttgccatcaccgcaatattaaaaacagcgatcaataaaaaggtgtaacgccagctaaattcctgacttaaatacgttcccagcggaatgcccagcaaattggcgactgtcatcccggaaaccatccccgccacggcggcggtgacttttccgggtttgataattttacttaacacgatcgctccgacgccaaaaaatgcgccatgcggaaagccggataccagccgaccaatggcgagcatcaggtaagagctagagagcgtgaacatggcgttgccaatgacgcacaacgccaccagaaacaacaagatatgtttgagactgtagcggctggaaaagagtgcgatgattggcgcaccgaccaccacccccagtgcataatagctgatcatatgcccggcggcaggaatgctaattcctacgttatgcgccagctccgtgagcacgcccataatgccaaattcggccatccccaaaccaaacgtgcccagagccaaagataaaatgacttttttcataccaccatcacaaccaccagaacggctaccaatcaccgtagccaataaagtgatagcttgcaggataacgaccagcaaggccaagagataattcgcccctctgtattcattatcctgctgaatagttatttcactgcaaacgtactttccagtttgctgtagcccaggccgttgatctttttcactttgatctgcaccggaatacgctctttcatcgcttctacgtggctaatcacaccgatggttttgccactggcgttcagggcatccagcgcatcaagggcggtatccagcgtttcgctatccagcgtgccaaaaccttcatcaaggaacaggctgtcaatacgtgttttatggctgaccagatcgctaagcgccagcgccagcgccagactaacgaggaaactttcgccgccggaaagggtacgggtatcgcgtaccgcatctgcctgccaggtatcaacaacctcgacttccagcgcctcgctggctttgcgctgtaacagatagcgcccgtgcagccgggtaagttgctgattagcgagatggactaaattatccagcgtcagcccctgggcaaacttgcggaatttatcgccctctttggaacctattaggctattcagatatccccagtcctcaacctgctgcgtcatttgagcaatttgctgcattaaggtttgttgttgctgacggttatctgcatcctgcttcagctgctggcgaatctcgccttgactcgtggtgttttcacgcaacttttggtgagtttgcgctaactcttgctgaatctgctccaccgtcacagtgagagccaacccgtcgtcaggtcggtgttgttgatgctgtgccagcgtttctgctgtctgagtgaccagagtttgcgcctgacggcgctggttttccagattctgcttgagctgttccagctgcgttagtgtttgttcatccattagcgccgcaaggaacgcctgctgatcgtcaaagacgctggcctgtagcgcggtgtcaaactgcgcctgggctttttgcagactttgcgccgccagaacatcctgttgctgtaacgtctgctgctggctgtgtaatgcgagacattgttcatgtacctgccgccagttttccaataccacagtttcttcgcagtgcgggagttcatcactttgcggcaacgtttccagaatcggcgtcagctgctgaatacggttttgcagcgcggttaattcgttctggcgttgctgccagctctgcgcttcttgctgacgtgtcgccaaccagctctcttcttcatcttcctgtggcaatgtcagtgcataacccgtcaatgtcgttaaaagtagttgctggcgttgttcaatttgctgttgatactggataatttgctgattatgcgcggcaatctgcccttgtaattcatgccgttggctgagtaaccgcagctggcgttcgtgctcatcttgtgcatccagccacggttgaatatcgtccagtggctgcaaggtgatattgaggctggccgtgacggcttgccattgttgagtaagtgcttgctcatcttgtcggaggctttgcgcttcgttttcatcacgctgaagctgctttgttatggcgtccagttgcccacgtagcgtcgcaccttcttcaccgagctttttaacttcgttttccagcgccagtaatcgagactgattaacgccaggctccagcgcctgatacgcctcgaccgccgggtggctggtggaaccacaaagtgggcaaggctgacccgcctgtaactgtgcacgttgagcttccagcgttttgatgcgcgcttcctgctcgcaaatggttttcacatcggcaagttgctgcgtcttttctttataacgctggcgcatttcgttaagtgcggcgttacgttgcgtctgttcttgcgtgacattctggatagcgacctgtaactgcgccagacgtttttgttggggaacaatctgtccatgcagcgcgaccaggtgctgacgcagtgggcgttgctcagcatgttgcgccagggcggtagcaacttcatcggcggttaacgtcaacgtgatcgccgcaagcgcattaagtttttgctcagcatgggttaactgttgctgccattgccgcagatgctcgcgatcgctggtttgttgggagaactgcgcacgccaacccgccggttcgttgttccactgacggaagcggtcgtgttcctgtaaccaggtattcaggctttgttgctgctgctgtaattctgcactctgcttcgccgcgtggtggcgaatgctcgcgcgaagcgccattgtgctctgtaagcgagtatttacttcttcaatctgctggcgaatatgcgccagcgccgcgctgtgttctgcgatgcgttcccagtgtggacgaagatttcgtgccggttgtgccagactaagcgccgccagttgaggttgcgctttttcttcttcggctaacgcctgttgcaaggcctgctgacggcggctggcttcttgctgcaattcgtcctgacgcgttaaccagtttaggctttgttgttcttgctgctgcgcggtaattaactgtttttcttcgtcagtaagtacctgcaaactcgctgtcaggctttgcacttgttccggcgtgagcaacgtgacgccgctggcctgcgcttgcagcttctccagctctgtgcgggcgcttttgtgctgctcaaaaaccatcgcgctgatttgcccgtagatttcagtgccggttaactcctcgagcaattccgcgcgttctttgggtttggcattcaggaaggcagcaaattgcccctggctaagcagcatgctacgggtgaagcgcccgtaatccagcccggttaacgtcgctgtcagttccagcttatctttcactttgtcggcgagaattttgccgtcggcgcagcgcgccagctctacgcgtggcacctgcaaattaccgtcgggttggttacgcgcccgattctggctccagaatgcacggtacgcttcacctttcacttcaaactccacctccgccagacattcggcggtatcgcgggtcatgagatcattttggctttgactaacgttagagagacgcggagtttcgtgatacagcgccagacaaatggcgtccagcagggtggttttccccgcacctgttgggccggtaatagcaaacagcccgttgctggcgaacggctcgcgggtgaaatcaatcttccattcgccttttaaactgttcaggtttttcaggcgcaggctgagaattttcatgcttcgtgttctccggcgagggtatgcaacgtcgtggtgaaaagatgctgcagacgttgctgctggctttcatccagttcttccagtgccagacggcgattgaacacctcttcgacgctgagttcgctgagggtttcacgctgttggctggctaacacacgctcgcgctgttcacgactccgacgtaccagcaatacttcgacaggcaaactttcggttaatgcctggattttgcgctgaatatcatgcagatactcatcagtagtgatttcgatatccagccagacaggtggctcctggcttacatcgcgccactgttccagctgtgcggtaatgctcgccagatcgcctttcagcactgccatgggttgcgttaccggtacgttcaggttttccacgctctctaatttgccgttactaaatgtcaccagatggacatatttactcttaccgcattcatcaaaactcagtggaatgggggagccgcaatagcgaacatgttccatgccgccaataatctgtgcgcggtgaatatgcccgagcgcgatgtagtcggctggtggaaagttttgtgccggaaacgcgtccagcgtgccaatataaatgtcacgcacggcgtcacttttactggcccccacggtcgttaaatgtcccgtggcgatgatgggcagaggctgatcgccgcgcagtttgcaggcatcggcatagtgttgttggtaataatcggtaatcgctgccagtaaatgctgctgtttttcaataccgttaagccccgcctggctggtaataatgtcacgcggacgtaaaaacggaatggggcacagcactgcgcctggcgtcccgtcgcgacgaggcaagatttgcggcgcatgtccggcgctggcgaccacggtagtattgaggaacgccatgatatcgcggctttcattcagcgtggcgacgctgtcatggtttcctgccagtaccaccagatgacagccagtttgctgtaaattgacaacaaaacggttgtataacgtgcgggcgtaactgggcgggctgccggtatcgaaaacatcaccggcaacaataatcgcatccacctgatgggtttgtgctgtctccagcagccagtcaagaaaagcctgatgttcagcttcgcggcttttactgtagaagttctggccgagatgccagtcactggtgtgaaggatgcgcataacggttccctggcgaaaaagcatgggcgcgattatacccaaacagatgtgccatttgcttttttctgcgccacggaaatcaataacctgaagatatgtgcgacgagcttttcataaatctgtcataaatctgacgcataatgacgtcgcattaatgatcgcaacctatttattacaacagggcaaatcatggcgagacgtattctggtcgtagaagatgaagctccaattcgcgaaatggtctgcttcgtgctcgaacaaaatggctttcagccggtcgaagcggaagattatgacagtgctgtgaatcaactgaatgaaccctggccggatttaattctcctcgactggatgttacctggcggctccggtatccagttcatcaaacacctcaagcgcgagagcatgacccgggatattccagtggtgatgttgaccgccagaggggaagaagaagatcgcgtgcgcggccttgaaaccggcgcggatgactatatcaccaagccgtttagcccgaaggagctggtggcgcgaatcaaagcggtaatgcgccgtattagcccaatggcggtggaagaggtgattgagatgcagggattaagtctcgacccgacatctcaccgagtgatggcgggcgaagagccgctggagatggggccgacagaatttaaactgctgcacttttttatgacgcatcctgagcgcgtgtacagccgcgagcagctgttaaaccacgtctggggaactaacgtgtatgtggaagaccgcacggtcgatgtccacattcgtcgcctgcgtaaagcactggagcccggcgggcatgaccgcatggtgcagaccgtgcgcggtacaggatatcgttttagtacccgcttttaacgccttgctcatcggacgcagagcagggcttatgatttcttaactggagtatcttacgtgctggaacggctgagctggaaaaggctggtgctggagctgctactttgctgcctcccggctttcatcctgggtgcattttttggttacctgccctggtttttgctggcaagcgtaacaggactgcttatctggcatttctggaatttattgcgccttagttggtggctgtgggtggatcgcagtatgaccccgccaccggggcgtggtagctgggaaccgctactatacggcttacaccagatgcagctgcgaaataaaaaacgccgccgtgaactgggcaatctgattaaacgctttcgtagcggcgcggagagcctgcccgacgcggtggtgctgaccacggaagagggcggtattttctggtgtaacggtctggcgcaacaaattcttggtttgcgctggccggaagataacgggcagaacatccttaacctactgcgttacccggagtttacgcaatatctgaaaacgcgtgatttttctcgcccgctcaatctggtgctcaacaccgggcggcatctggaaattcgcgtcatgccttatacccacaaacagttgctgatggtggcgcgtgatgtcacgcaaatgcatcaactggaaggggcgcggcgtaacttttttgccaacgtgagccatgagttacgtacgccattgaccgtgttacagggttacctggagatgatgaatgagcagccgctggaaggcgcggtacgcgaaaaagcgttgcacaccatgcgcgagcagacccagcggatggaaggactggtgaagcaattgctgacgctgagcaaaatagaagccgcaccgacgcatttgctcaatgaaaaggttgatgtgccgatgatgctgcgcgttgttgagcgcgaggctcagactctgagtcagaaaaaacagacatttacctttgagatagataacggcctcaaggtgtctggcaacgaagatcagctacgcagtgcgattagcaacctggtctataacgccgtgaatcatacgccggaaggcacgcatatcaccgtacgctggcagcgagtgccgcacggtgccgaatttagcgttgaagataacggaccgggcattgcaccggagcatattccgcgcctgaccgagcgtttttatcgcgttgataaagcgcgttcccggcaaaccggcggtagcggattagggttagcgatcgtgaaacatgctgtgaatcatcacgaaagtcgcctgaatattgagagtacagtaggaaaaggaacacgtttcagttttgttatcccggaacgtttaattgccaaaaacagcgattaatccgcctttgtcatcttttattgccataagccagtcgatgctggcttattttctttgcagtcaaaatacgggcgttagattttacaacgattggtgattttttgttcgcatgattagccatgtctttttcacggaaatagtgttttatactggttggtgatttcttatcgctatatacctctggtttttagatccctccttgctttaaaacgttataagcgtttaaattgcgcttcaggtgctgtcatactgactgcattaacgcggtaaatcgaaaaactattcttcgccgcgcctggttgggagtatttcccgctaaaattgtttaaatataccgctgtatcatccccagggattggcacaaaaatttaacgttacaacaccacatccacaggcagtatgatttatgacccatcaattaagaagccgcgatatcatcgctctgggctttatgacatttgcgttgttcgtcggcgcaggtaacattattttccctccaatggtcggcttacaggcaggcgaacacgtctggactgcggcattcggcttcctcattactgccgttggcctgccggtattaacggtagtggcgctggcaaaagttggcggcggtgttgacagcctcagcacgccaatcggtaaagtcgctggcgtactgctggcaacggtttgttacctggcggtggggccgcttttcgctacgccgcgtacagctaccgtttcctttgaagtggggattgcgccgctgacgggtgattccgcgctgccgctgtttatctacagcctggtctatttcgctatcgttattctggttagcctctatccgggcaagctgctggataccgtgggcaacttccttgcgccgctgaaaattatcgcgctggtcatcctgtctgttgccgctattgtctggccggcgggttctatcagcacggcgactgaggcttatcaaaacgctgcgttttctaacggcttcgttaacggctatctgaccatggatacgctgggcgcaatggtgtttggtatcgttattgttaacgcggcgcgttctcgtggcgttaccgaagcgcgtctgctgacccgttataccgtctgggctggcctgatggcgggtgttggtctgactctgctgtacctggcgctgttccgtctggggagtgacagcgcgagcctggtcgatcagtctgcaaacggcgctgctattctgcatgcttacgttcagcacacctttggcggcggcggtagcttcctgctggcggcgttaatcttcatcgcctgcctggtaacggcagttggcctgacctgtgcttgtgcagaattctttgcccagtacgtaccgctctcttatcgtacgctggtgtttatcctcggcggcttcagcatggtggtttctaacctcggcttaagccagctgatccagatctccgtaccggtgctgaccgctatttatccgccgtgtatcgcactggttgtattaagttttacacgcagttggtggcataatagctcccgcgtgattgctccgccgatgtttatcagcctgctttttggtattctcgacgggatcaaagcatctgcattcagcgatatcttaccgtcctgggcgcagcgtttaccgctggccgaacaaggtctggcgtggttaatgccaacagtggtgatggtggttctggccattatctgggatcgcgcggcaggtcgtcaggtgacctccagcgctcactaaatcactgaacatttgttttaaccacggggctgcgatgccccgtggttttttattgtgttgatgggttaggaattgatggaaagtaagaacaagctaaagcgtgggctaagtacccgccacatacgctttatggcactgggtagtgcaattggcaccgggctgttttacggtagcgcagacgccatcaaaatggccggtccgagcgtgttgttggcctatattatcggtggtatcgcggcgtatatcattatgcgtgcgctgggggaaatgagcgtacataacccggccgccagctctttcagccgttatgcgcaggaaaacctcggcccgctggcaggttacattaccggctggacctactgctttgaaatccttattgtcgccatcgccgatgtgaccgcttttggtatctatatgggtgtctggttcccgacggtgccgcactggatttgggtactgagcgtggtgctgatcatttgcgccgtaaacctgatgagcgtgaaggtattcggtgagctggaattctggttcagcttctttaaagtcgccaccatcatcatcatgattgtcgccggtttcggcatcatcatctgggggattggcaacggcgggcaaccgaccggtattcataacctgtggagcaacggcggcttcttcagtaacggctggcttggcatggtaatgagcttgcaaatggtgatgtttgcttacggtgggatcgaaattatcgggattaccgccggtgaagcgaaagatcctgagaaaagcataccgcgtgcgattaactccgtgccgatgcgtattctggtgttctacgtcggtacgctgttcgtcattatgtctatctacccgtggaatcaggttggcactgccggtagcccgttcgtgctgacgttccagcatatgggcattacctttgccgccagcattcttaactttgttgtgctgactgctagcctgagcgcaattaacagtgatgtatttggcgtaggccgtatgctccacggtatggcagagcagggcagcgcgccgaaaattttcagcaaaacgagccgtcgcggtattccgtgggttacggtgctggtgatgactaccgcgctgctgtttgcggtgtatctgaactacatcatgccggaaaacgtcttcctggtgatcgctagcctggcaaccttcgccacggtgtgggtgtggattatgatcctgctgagccaaattgccttccgtcgccgtttgccgccagaagaagttaaggcgctgaaatttaaagtgccgggtggggtagcaacgaccatcggcgggctgattttcctgctctttattatcgggttgattggttatcacccggatacgcgtatcagcctgtatgtcggtttcgcgtggattgttgtgctgttgattggctggatgtttaaacgccgccacgatcgtcagctggctgaaaaccagtaatccttgcgttctgtaagccggttcaggaggaaatcctgatccggctattccgaaagttatccgcccccgtcctcctcccccaaatatccttcagatgatgagtgatcctgcattaggctatggcaaggtgatcagattttcatcacaggggaattatgatgttaaatgcatggcacctgccggtgcccccatttgttaaacaaagcaaagatcaactgctcattacactgtggctgacgggcgaagacccaccgcagcgcattatgctgcgtacagaacacgataacgaagaaatgagtgtaccgatgcataagcagcgcagtcagccgcagcctggcgtcaccgcatggcgtgcggcgattgatctctccagcggacaaccccggcggcgttacagtttcaaactgctgtggcacgatcgccagcgttggtttacaccgcagggcttcagccgaatgccgccggcacgactggagcagtttgccgtcgatgtaccggatatcggcccacaatgggctgcggatcagattttttatcagatcttccctgatcgttttgcgcgtagtcttcctcgtgaagctgaacaggatcatgtctattaccatcatgcagccggacaagagatcatcttgcgtgactgggatgaaccggtcacggcgcaggcgggcggaagtacgttctatggcggcgatctggacgggataagcgaaaaactgccgtatctgaaaaagcttggcgtgacagcgctgtatctcaatccggtgtttaaagctcccagcgtacataaatacgataccgaggattatcgccatgtcgatccgcagtttggcggtgatggggcgttgctgcgtttgcgacacaatacgcagcagctgggaatgcggctggtgctggacggcgtgtttaaccacagtggcgattcccatgcctggtttgacaggcataatcgtggcacgggtggtgcttgtcacaaccccgaaagcccctggcgcgactggtacagctttagtgatgatggcacggcgctcgactggcttggctatgccagcttgccgaagctggattatcagagcgaaagtctggtgaatgaaatttatcgcggggaagacagtattgtccgccactggctgaaagcgccgtggaatatggacggctggcggctggatgtggtgcatatgctgggggaggcgggtggggcgcgcaataatatgcagcacgttgccgggatcaccgaagcggcgaaagaaacccagccggaagcgtatattgtcggcgaacattttggcgatgcacggcaatggttacaggccgatgtggaagatgccgccatgaactatcgtggcttcacattcccgttgtggggatttcttgccaataccgatatctcttacgatccgcagcaaattgatgcccaaacctgtatggcctggatggataattaccgcgcagggctttctcatcaacaacaattacgtatgtttaatcagctcgacagccacgatactgcgcgatttaaaacgctgctcggtcgggatattgcgcgcctgccgctggcggtggtctggctgttcacctggcctggtgtaccgtgcatttattacggtgatgaagtaggactggatggcaaaaacgatccgttttgccgtaaaccgttcccctggcaggtggaaaagcaggatacggcgttattcgcgctgtaccagcgaatgattgcgctgcgtaagaaaagtcaggcgctacgtcatggcggctgtcaggtgctgtatgcggaagataacgtggtggtatttgtccgcgtgctgaatcagcaacgtgtactggtggcaatcaaccgtggcgaggcctgtgaagtggtgctacccgcgagtccgtttctcaatgccgtgcaatggcaatgcaaagaagggcatgggcaactgactgacgggattctggctttgcctgccattagcgctacggtatggatgaactaacgttttataacgccttgcgactcgcctgcgccatcatccgcggataaaactgccagaagcgggtttcgagggcgtcataatgagcgtctaaatcgtaccaggagtcacgcagggcatccagacgtgggcggcggcttgccatgccgtttaacacgttctggatgaaatccatatcgcgatagcgcaccagccactgctcactccacaagtaattgttcagattgataaaacgtggcggactgtccggcaaaatcgtcatcacttgctcgcgggcataacagacaaattcctgtagcggaaagtccgggctcagctggctccagtggcgggaaagaaagtgatcccacatgacatccagcgtaataggcgcaacgcggcgcgtttcactacgaaaccactcccgtgcttcgcggacttccggcagattgtcagtcaatacgtcgatacgtcgatgcatatgaatgccagccacgacgtcgggcggaaaactttcttcaggatttccgcgtacgaaatcagccagtaaattgccggaaaggctgctttccgcgagatgggctaaatgcaggtgagctaaaaaattcatcgattatattctatccaaaagggggtaaaggttgcagggagagcgccccggcactagactacccgcctcttattttagtctgagtcagtgtcatgcgcgttaccgatttctcctttgaattgcccgaatccctgattgcccactatcccatgcctgaacgcagtagctgtcgtttactgagcctggacgggccgacgggcgcgctgacgcacggtactttcaccgatttacttgataagctcaaccccggcgatcttctggtttttaataatacccgcgtgatcccggcgcgcctgtttgggcgtaaagccagcggcggcaagattgaagtgctggttgaacggatgctcgacgacaaacgcattcttgcgcatattcgcgccagcaaagcgccaaaacctggcgcagaactgctgctgggcgatgacgaaagtattaacgcaacaatgaccgcgcgccacggcgcactgtttgaagtcgaatttaatgatgaacgcagcgtgctggatattctcaacagcatcggccatatgccgctgccgccgtatatcgaccgtccggacgaagacgctgaccgcgaactttatcaaaccgtttatagcgaaaaaccgggcgcggttgcagccccgaccgcaggtctgcattttgacgagcctttgctggaaaaattgcgcgccaaaggcgtggagatggcgtttgtgacgttgcacgttggtgcgggcaccttccagccggtgcgcgtcgacaccattgaagatcacatcatgcacagcgaatacgctgaagtaccgcaggatgtggtagacgcggtactggcggcgaaagcgcgcggtaaccgggtgattgcggttggcaccactagtgtacgtagcctggaaagcgcggctcaggcagcgaaaaacgatctcattgaaccgttcttcgacgatacccaaatctttatctatccgggcttccagtacaaagtggtcgatgcgctggtgacgaacttccacttgccagagagcacgctgattatgctggttagcgcctttgccggttatcaacacaccatgaacgcctataaagcagcggtagaagagaaatatcgcttttttagttacggtgatgcgatgtttatcacgtacaatccgcaggcaattaatgagcgcgtcggggagtaattccgcggcgctggtttaaaacgttggactgtttttctgacgtagtggagaaaaaatgaaatttgaactggacaccaccgacggtcgcgcacgccgtggccgcctggtctttgatcgtggcgtagtggaaacgccttgttttatgcctgttggcacctacggcaccgtaaaagggatgacgccggaagaagttgaagccactggcgcgcaaattatcctcggcaacaccttccacctgtggctgcgcccgggccaggaaatcatgaaactgcacggcgatctgcacgattttatgcagtggaaggggccgatcctcaccgactccggcggcttccaggtcttcagccttggcgatattcgtaaaatcaccgaacagggcgtgcacttccgtaacccgatcaacggcgatccgattttcctcgatcctgaaaaaagtatggagattcagtacgatcttggtagcgatatcgtcatgatctttgatgagtgtacgccgtatcctgctgactgggattacgcaaaacgctccatggagatgtctctgcgttgggcgaagcgtagccgtgagcgttttgacagtctcggaaacaaaaatgcgctgtttggtatcatccagggcagcgtttacgaagatttacgtgatatttctgttaaaggtctggtagatatcggttttgatggctacgctgtcggcggtctggctgtgggtgagccgaaagcagatatgcaccgcattctggagcatgtatgcccgcaaattccggcagacaaaccgcgttacctgatgggcgttggtaaaccagaagacctggttgaaggcgtacgtcgtggtatcgatatgtttgactgcgtaatgccaacccgcaacgcccgaaatggtcatttgttcgtgaccgatggcgtggtgaaaatccgcaatgcgaagtataagagcgatactggcccactcgatcctgagtgtgattgctacacctgtcgcaattatagtcgcgcttacttgcatcatcttgaccgttgcaacgaaatattaggcgcgcgactcaacaccattcataaccttcgttactaccagcgtttgatggcgggtttacgcaaggctattgaagagggtaaattagagagcttcgtaactgatttttaccagcgtcaggggcgagaagtaccacctttgaacgttgattaatattaataatgagggaaatttaatgagcttttttatttctgatgcggtagcggcaacgggtgcaccggcgcaaggtagcccgatgtctttgattttgatgctggtggtattcggtctgattttctatttcatgatcctgcgtccacagcagaagcgcaccaaagaacacaaaaagctgatggactccattgccaaaggtgatgaagttctgacgaacggtggcctggttggtcgcgtaaccaaagtagcggaaaacggctacattgctatcgcgctgaatgacaccactgaagtagttattaaacgtgacttcgtagctgccgtcctgccgaaaggcaccatgaaggcgctgtaattaaaatttttccctaagggaattgccgtgttaaaccgttatcctttgtggaagtacgtcatgctgatcgtggtgattgtcatcggtctgctgtatgcgcttcccaacctgtttggtgaggatccggctgttcagatcactggtgcgcgcggagtcgccgccagtgagcaaacgctgatccaggtccagaaaacgttacaagaagaaaaaataactgctaagtctgtggcactggaagagggcgctattcttgcgcgcttcgactccactgacacccagttgcgcgctcgtgaagcattaatgggcgttatgggtgacaaatacgtcgtggcgcttaaccttgccccggcaacgccgcgctggctggcagctattcacgctgagccgatgaagctcggccttgacctgcgtggcggcgttcacttcctgatggaagtggatatggacaccgcgcttggcaaactccaggaacaaaatatcgatagcctacgcagtgacctgcgcgaaaagggcatcccgtataccactgttcgtaaagaaaacaactacggcctgagcatcactttccgcgatgctaaagctcgtgatgaagccattgcgtatctgagcaagcgccatccggacctggtgattagcagccagggcagcaaccagctgcgtgcggtaatgagcgatgctcgtctgagtgaagcgcgtgaatatgcggtgcagcagaacattaatatcctgcgtaaccgtgtaaaccaacttggcgtggcggagccggtggttcagcgtcagggtgctgaccgtatcgttgttgaactgccaggtattcaggacactgcgcgtgcgaaagagattctgggtgcgacggcaacgctggaattccgtctggtaaacaccaacgttgaccaggccgctgcggcatccggtcgcgtaccgggcgactctgaagtgaaacagacccgcgaaggtcagccagttgtgctgtacaaacgcgtaattctgaccggtgaccatatcaccgactccacttccagccaggacgaatacaaccaaccgcaggttaacatcagcctcgatagcgctggtggtaacatcatgtctaacttcactaaggacaacatcggcaaaccgatggcaaccctgtttgtggagtacaaagacagcggtaagaaagatgcaaatggtcgtgcggttctggtgaaacaggaagaggtgattaacatcgccaacatccagtctcgtctgggtaacagcttccgtatcaccggcatcaacaacccgaacgaagcccgtcagctgagtctgctgctgcgtgccggtgcgttgatcgcgccgattcagattgttgaagaacgtaccattggcccaaccctgggtatgcagaacattgaacaggggctggaggcttgccttgccggtctgctggtttctattctgttcatgatcatcttctataagaagtttggtctgattgcgaccagtgctctgattgccaacttgatcttaatcgtcggcattatgagcctgttgccaggcgcaacgctgagtatgccaggtatcgcgggtatcgtcttaacccttgcggtggcggtcgatgcgaacgtactgatcaacgaacgtattaaagaagagttgagcaacggacgtactgttcaacaggcaattgatgaaggttatcgtggcgcattcagttctatcttcgatgcgaacatcaccacgctgattaaagtcatcatcctgtacgcagtgggtaccggggcaattaaagggttcgcgattactaccggtatcggtgtggcgacgagcatgtttaccgcgattgtcggtacgcgtgccatcgtaaacctgctatatggcggcaagcgcgtcaagaagctgagtatctgaggagtgcgatgtggcacaggaatatactgttgaacaactaaaccacggccgtaaagtctatgactttatgcgctgggactactgggctttcggcatctctggtctgctgttaatcgctgctatcgttattatgggcgtgcgcggctttaactgggggctggatttcaccggtggtacggttattgaaattacgctcgaaaaaccggctgaaattgacgtaatgcgtgatgcattgcaaaaagccggttttgaagagccgatgctgcaaaactttggtagcagccatgacatcatggtccgtatgccgcctgctgaaggcgaaaccggcggtcaggtgttgggcagccaggttctgaaggtgattaacgaatccaccaatcagaatgcagcagtgaagcgtattgagttcgtcggtccgagcgtgggggcagaccttgcgcaaaccggtgcgatggcgttgatggcagcgctgctgtctatcctcgtgtacgtaggtttccgctttgagtggcgactggcggcaggggtggttattgcgctggcgcacgacgttatcattacgctgggtattttgagcttattccatatcgagattgacctgaccattgtggcaagcttgatgagcgttatcggttacagccttaacgacagtatcgtggtaagcgaccgtattcgtgaaaacttccgcaagatccgtcgcggtacgccttacgaaatctttaacgtgtccttgacccagacgctgcaccgtaccttgatcacatccggtactaccttgatggttatcctgatgctgtacctcttcggtggtccggtactggaaggcttcagcctgaccatgcttatcggtgtttccatcggtactgcatcttccatctatgtggcatctgcgttggctctgaaactgggtatgaagcgcgaacacatgttgcagcagaaagtggaaaaagaaggggcggatcagccgagtattctgccgtaatcaagttcccgttgatgttgaaaatcccggtcagaagatcgggattttttttgatgtatggagattgcgaaaatccccgcatcttgggaaactgcgcgtaaccctacatttcatccaggtaacttttcatggctatcatcccaaaaaactatgcgcggttagaaagcggctatcgcgaaaaagcattaaaaatctatccgtgggtctgcggtcgctgttcccgcgagtttgtttattccaacctgcgtgaacttaccgttcaccacattgatcacgaccataccaataacccggaagatggcagtaactgggaattgttgtgtctctattgccacgatcatgagcatagcaaatataccgaagcggatcagtatggtacgaccgttatcgcaggggaagatgcgcagaaagatgtcggtgaagcgaagtacaacccattcgctgacctgaaagcgatgatgaacaagaagaagtgattaaaacgtaaaattgcctgatgcgctacgcttatcaggcctacgttatttcagcaatatattgaatttacgtgcttttgttggccggacaaagcgtttacgccgcatccggcatgaacaaagcacacgttgttaacaatcagaaatgccgggaataaatcccggcattttcataatcagaagttgtaacctactaccaggtaaccaccccagccggtagagcgaacgttgaagttgccgttgccgaagttcagttctgcatcgtcgttccactgaccaccgtcgtgccagtaacgagctacgacagagtagtgccagtgatcgtagttcagagccagaatatggctggaagcgatagagttattagtacgggtcttaataccgttgattgcgttaccgctgtcatcccctaaatcggaaccccagtcgaagttggtgaagccgatgtagctcagctgaccgccccacagatcggtaatcggcacaaagtatttaattttgaaacggtaaccgtcccactcgttttcgttcgctgcgccatagttctgccactggtatttcgcatagacgttcatggacaggctcatcggcaggccagtgtcgatatcggtacccagacccatgtaccaggtgctctggcgaccatctttattacgacccatgtcgtaaatgtagttgttcgcgaagtaccactctttgaacggaccgaagctaaggtcagtattggtcagcttgtcgatggagaaacgtggttcgatttccataaacagcggagaaccgtggttccagatacctttagcatcggagttaccgccgaagaataccggcgcatccgcataaccatagaagtcgaaccagtcttttttagcgaatgcttcgtactcaaggtaggtatcgttgcggatctgcggtccgaaacgggtgtgatagcttccgacaacgttaacgctctggtgccaccagtcggaaagatactgcggtttgtcgttttcagctgcgttgacagtaaaagagctagagagcgccagtaccgcaccggctgccagtaatgtttttttcatatgtatgccactgtttgaaaatcccttgcgggagtgaaaaaggcgcaaattgcgtttctaaatatttcgtatacagaggagcctattataaaaatcattgctcacaaaaatatgtttcgtttcacagttctatcatttacgtaatcgattgcgttcacgtttacacacattcgggcggggattgtactgactttcgcccttgttgcaaacttttactatcaatccaggtgatgtaagcagagtaacaaaatgacggggaaagatgttgcgggacgcacaaaatcgtcccgaaatacgtttactgcataacaggttgaatgtcgtggatacgtacaaagcctaactgatccacagaaatcccctttaactgtaacggaatatcaacatcgctgggggcgaggacgctggcaggggcattaatcaattgattctgcacattgatttcctgaaagttgtctattgttccctgaatttgcccatattcaacagttccgctgaatgcgggcaagggatcattgctctcaccctgaatacgtagtgtaagggtggtgccatctgcatcaggcgtaatattcaccaggctcatacgtaaagtaccgatctggctttccagtcttgccggtgttttcgctccaggcagaaggtaaaccccactgctggattttgcattcagcctgttttgctgagtgattttgactgtttcttgattgagttgcgtcatctcctggttcagcgtgctgacgctgtgtttcatctgtcgcacttcactttgctgcacacaggcgctaaggctgaacaggcttcccagcaggagcagtcgaaaaacgttagtattcataggtcgtccctttctcgtcgcaattagcctaatggtagagggtaaaagcagcgaaagcatcgatcctttatctcaaaagcgttgcgcctttgttgtatcgtcagttcagggtaaaatagatttccgttaaccacctggtcaggacgccgtatgcattgcccattctgtttcgccgtggacactaaggtaattgactctcgtctcgtgggcgagggtagttccgtacgccgccgtcggcagtgtctggtgtgtaatgaacgtttcaccacctttgaagtggcggagctggttatgccgcgtgttgtaaaaagcaacgacgtgcgtgaaccgtttaatgaagagaaattgcgtagcggaatgctgcgggcgctggaaaaacgtccggtgagttccgatgacgtcgaaatggcaatcaatcatattaaaagccagctgcgcgccaccggtgagcgcgaagtgccgagcaagatgattggcaatctggtgatggagcaattgaaaaagctcgataaagtcgcctatatccgttttgcctctgtctaccgcagtttcgaagatatcaaagaatttggcgaagagatcgcgcgcctggaggactaagccgtgcaggacgagtattacatggcgcgggcgctaaagctggcgcaacgaggacgttttaccacgcatcccaacccgaatgtcgggtgcgtcattgtcaaagatggcgaaattgtcggtgaaggttaccaccaacgtgcgggtgaaccacatgccgaagtacacgcgttgcgtatggcgggtgaaaaagccaaaggtgcgaccgcctatgtcacactcgaaccctgtagccatcatggtcgtacgccaccgtgctgtgacgcactcatcgccgctggcgtagcgcgcgtggttgccagcatgcaagatcctaacccgcaggtcgctgggcgtggactttaccgtctgcaacaggctggcattgacgtcagccacggcctgatgatgagtgaagccgagcaattgaataaaggctttctcaagcggatgcgcaccggctttccttatattcagttaaaacttggcgcaagccttgatggtcgcacggcgatggcgagcggcgaaagccagtggatcactagcccccaggcgcggcgtgatgtacaactactgcgcgcgcaaagtcatgccattttaaccagcagcgccacggtgctggcggatgatcctgccttaacggtgcgttggtctgaactggatgaacaaactcaggcgctctatccgcaacaaaatctccgtcagccgatacgtattgtgattgatagccaaaatcgcgtgacgccggtacatcgcattgtgcagcagcccggcgaaacctggttcgcgcgtacgcaggaagattctcgtgagtggccggaaacggtgcgtaccttgctgattccagagcataaaggtcatctggatctggttgtactgatgatgcaactgggtaaacagcaaattaacagcatctgggtggaagcggggccaacgctcgctggcgcattgctgcaggcgggtttagtcgatgagctgattgtctatatcgcacctaaactattaggcagcgacgcccgcggattatgcacgctgccagggcttgagaaattagccgacgccccccaatttaaattcaaagagatacgtcatgtaggcccggatgtttgcctgcatttagtgggtgcatgatctcccggctcgaaagggaagcagcgcacgaaatattatgctaaaatccgcccccctgcggggccatactcgaacccgaaggaagaaaatgaacattattgaagctaacgttgctaccccggacgctcgcgtcgccatcaccatcgcgcgtttcaacaactttatcaatgacagcctgctggaaggtgcaattgacgcactgaaacgtatcggtcaggtaaaagatgaaaacattaccgttgtttgggtgcctggtgcctatgagctgccgctggcggcgggtgcactggctaaaaccggtaaatacgacgcggtgattgcgctgggtacggttattcgtggtggcactgcccactttgaatatgtcgctggtggtgcaagcaacggcctggcgcatgttgcccaggacagcgaaattccggttgcttttggggttctgaccactgaaagcattgaacaagcgatcgaacgtgctggcaccaaagctggcaacaaaggtgcagaagctgcactgaccgcgcttgaaatgattaatgtattgaaagccatcaaggcctgaaattagtaaggggaaatccgtgaaacctgctgctcgtcgccgcgctcgtgagtgtgccgtccaggcgctctactcctggcagttgtcccagaacgacatcgctgatgttgaataccagttcctggctgaacaggatgtaaaagacgttgacgtcctgtacttccgtgagctgctggccggggtggcgactaataccgcatacctcgacggactgatgaagccatacctgtcccgcctgctggaagaactgggacaggtagaaaaagcagtactgcgcattgcgctgtacgaactgtctaaacgtagcgatgtgccatacaaagtggccattaacgaagcgatcgaactggcgaaaagcttcggcgcagaagacagccataagttcgtcaacggcgtactcgataaagcagcacctgtgattcgccctaacaaaaagtgatatccaggccggtagattcacggaagaccgttccatgatcgccggccttttcttttttacctgctgaggcataacgtatggcatgtggcgagttctccctgattgcccgttattttgaccgtgtaagaagttctcgtcttgatgtcgaactgggcatcggcgacgattgcgcacttctcaatatccccgagaaacagaccctggcgatcagcactgatacgctggtggcgggtaaccatttcctccctgatatcgatcctgctgatctggcttataaagcactggcggtgaacctaagcgatctggcagcgatgggggccgatccggcctggctgacgctggcattaaccttaccggacgtagacgaagcgtggcttgagtccttcagcgacagtttgtttgatcttctcaattattacgatatgcaactcattggcggcgataccacgcgtgggccattaagtatgacgttgggtatccacggctttgttccgatgggacgagccttaacgcgctctggggcgaaaccgggtgactggatctatgtgaccggtacaccgggcgatagcgccgccgggctggcgattttgcaaaaccgtttgcaggttgccgatgctaaagatgcggactacttgatcaaacgtcatctccgtccaagcccgcgtattttacaggggcaggcactgcgcgatctggcaaatagtgccatcgatctctctgacggtttgatttccgatctcgggcatatcgtgaaagccagcgactgcggcgcacgtattgacctggcattgctgccgttttctgatgcgctttctcgccatgttgaaccggaacaggcgctgcgctgggcgctctctggcggtgaagattacgagttgtgtttcactgtgccggaactgaaccgtggcgcgctggatgtggctctcggacacctgggcgtaccgtttacctgtatcgggcaaatgaccgccgatatcgaagggctttgttttattcgtgacggcgaacctgttacattagactggaaaggatatgaccattttgccacgccataaagatgtcgcgaaaagtcgcctgaagatgagtaatccgtggcatctacttgctgtcggattcggaagtggattaagcccgatcgttcctgggacgatgggcagcctggcagcgattccgttctggtatctgatgacctttttgccctggcagctctacagcctggtggtgatgctggggatctgtatcggcgtctatctttgtcatcaaacggcgaaagacatgggtgtgcacgatcatggcagcattgtctgggacgaatttattggtatgtggatcacgctcatggcgctgccgaccaatgactggcagtgggttgccgccgggtttgtgattttccgtattctggatatgtggaagccgtggccgatccgctggtttgatcgcaatgtgcatggcggcatggggatcatgatcgacgatattgtcgccggggtgatttccgcaggcatcctgtattttatcggtcatcactggccgctgggtattctgagctaattgtgcaccgatgcctgatgtgacgcttgtcacgtctcatcaggcctggactcttatttaaatcctacgacaggatgcggtttatacggcgtttccagttcggcaatctgttccggcttcaaagtgatatccaccgcgttcaatagctcatcaagctgttcttcgcggctagttccgataatcggtgcggcaatgcccggtttactcaacaaccaggccagcgcaacttgtgctcgtgtcgcccccagttcttcactgacgcctgttaaccgctctgcgatctgcgcgtcattttcatcgctttctttatagagatttttccccacctcatcagacaccagtcgtgcggtagtttctccccacggacgcgtcagacggccccttgccagcgggctccatggaattaccgccacgccctcctgataacacagtggtagcatctcgcgctcttcttcacgataaatcagattgtagtgatcctgcatactgacaaactgcgcccagccgtgctgtttttggagttccagtgcctgagcaaactggctagcgtgcatactactcgcgccgatataacgcgctttcccggcttttaccacgtcgttgagggcttccagcgtctcttcgatcggcgtgttgtaatcccagcgatgaatttgcaggatatcgacataatccatgccgagacgtcgcaggctgtcgtcgatagagcgcaaaatttgcgcacgggataatccttccggtaaatcaccaacgcgatggaacactttggtcgcaacgaccacgtcttcacgacgggcgaaatcccgcagtgcgcgaccgacgatctcttcgctgctgccgtcagaataactgttggcggtatcaaagaaatttatgccgccttccagtgcacgtttaattatgggacggctgctttcttccggcagtgtccatgcgtgattaccgcgatctggctcgccaaaggtcatacagccgaggcaaagtcgggaaacgcgaaggtcggtttttcctaaggggttgtattgcatgctgccactcctgctatactcgtcatacttcaagttgcatgtgctgcggctgcattcgttcaccccagtcacttacttatgtaagctcctggggcttcactcgtttgccgccttcctgcaactcgaattatttagagtctatgaataatttcttaagcatagcaggagtggagtagggattatgccagccaggccttgattttggcttccataccagcggcatcgaggccgagttcggcgcgcatttcttcctgagttccttgcggaataaagaagtccggcaggccaatgttcagcacgggtactggtttacgatgggccatcagcacttcgttcacgccgctgcctgcgccgcccataatggcgttttcttctacggtgaccagcgcttcatggctggcggccatttccagaattaacgcttcatcaagcggtttcacaaaacgcatatcgaccagcgtggcgttcaggctttcggcgactttcgccgcttctggcatcagcgtaccaaagttaaggatcgccagtttctcgccacgacgcttcacaatgcctttgccaattggtagtttttccagcggcgtcagttccacgccgaccgcgttgccacgcgggtagcgcaccgcactcgggccatcgttatagtgatagccggtatagagcatctggcgacattcgttttcatcgctcggggtcataatgaccatttccggtatgcagcgcaggtaagagagatcaaaagcaccctgatgggtttgaccgtcagcaccaacaatgcccgcgcggtcgatggcgaacaggaccggaagcttttgaatcgccacgtcatgcagcacctgatcataggcgcgttgcaggaaagtggagtaaatcgcgacaatgggtttgtacccaccaatcgccagacccgcagcaaaggtcaccgcgtgttgctcggcaattgccacgtcgaagtagcgatccgggaatttacgactaaactcgaccatgccggaaccttcacgcatcgccggagtaatcgccatcagcttgttgtctttcgctgccgtttcgcacaaccagtcgccaaagattttactatagctcggcaaaccgccgctacttttcggcaaacaaccgctggagggatcaaatttaggcacggcgtggaaagtgatcgggtctttttctgccggttcataaccacgaccttttttggtcatgatatgcaggaactgcgggcctttcaggtcgcgcatgttctttagcgtggtgataagccccagcacatcgtgaccgtccaccgggccgatgtagttaaagcccagctcttcaaacaacgtgccaggcactaccatgcctttaatatgttcttcggtgcgtttgagcagctctttaattggcggcacgccagagaaaacttttttcccgccttcgcgcagactagagtaaagcttaccggaaagcagctgtgccagatggttgttgagcgcgccgacattttcggaaatgctcatttcattgtcgttgagaatcaccagcatatcaggacggatatcgcccgcgtgattcatcgcttcaaacgccatgcctgcggtaatcgcgccatcgccaatgacacagacggtgcggcgatttttgccttctttttcggcagcaaccgcaataccaattccggcactgatggaggtactactatgcccgacgcttaatacgtcatattcgctttcgccgcgccacgggaacgggtgcagaccgcctttctgacggatggtgccgattttgtcgcggcgtccggtcaaaattttatgcggataagcctgatgccccacatcccaaatcaattggtcaaacggggtgttgtagacatagtgcagcgccacggtcagttcgaccgtgcccagcccggaggcgaagtgcccgctggaacggctcacgctgtcgagtaaatagcggcgcagttcgtcgcagagtttcggtaaactctctttcggcaacagtcgtaactcctgggtggagtcgaccagtgccagggtcgggtatttggcaatatcaaaactcatcaggggcctattaatacttattgtttatttattacgctggatgatgtagtccgctagcgcttccagtgcgctggtatcgagactctgttcagccagttgtttcaggctctgacgggcatcgtcgatcagatcccgggctttcttccgggcttgctcaagacccagaagtgcagggtaggtacttttaccaagttgctggtcggcaccctggcgttttcccaacgttgcagtatctcccaccacatccaggatgtcatcctgaacctggaaggcaaggccgatgctctctgcatacttgtcgagtaccggcagagcacgacgtcctttatctccggcgcttaatgcaccaaggcgaacggcggcgcgaatcaatgcgccggttttatgacgatgaatacgctcaagcgcgtccagaggtacgtgtttgccttccgcgtctaaatctaatgcctgaccaccgcacattccggcaataccactggcgctcgccagttcagaaatcatgctaattctgtcgcggtcgctcacttccggcatatcggcatcgcttaaaatgctgaacgccagcgtttgtaaagcgtcgccagcgagaatcgcgtttgcttcgccaaacttcacatggcaggttggcaaaccgcgacgcagatcgtcatcatccattgccggtaaatcatcatgaattaaactgtaagcgtggatacactcaacggcggcagcgggtgcgtccagcgtgtttgtgctaacgccgaacatatgaccggtggcataaaccaggaaaggtcgcaggcgcttaccacctaataatgcgccatactgcatggtttcgaccacgggagtgttctgaaagggcagtggggcgataaaacggctcagcgcctggttggcctgcttaacgcaggcttcgagttgctgcggaaagtccattactcattgtccggtgtaaaaggggttagagaggcgtcttcattgtcagacagcagaatttgtacgcgctgttcggcttgttgtaatttggcctgcccctgacgtgccagctgcacgccgcgttcgaactcgttcagcgcctcttccagcggcaggtcgccactttccagacgggttacaatctgttccagctcgctcagcgccttttcaaagctggcgggcgcctcatttttcttcggcataatgaatgtctgactctcaatatttttcgccccgtcatggtaacggactcagggcaaatagcaaataacgcgcaatggtaaggtgatgtgcacagcaaagcgatgttagtggtatacttccgcgcctggatgcagccgcaggtgtgggctgctgtatttttccctatacaagtcgcttaaggcttgccaacgaaccattgccgccatgaagtttatcattaaattgttcccggaaatcaccatcaaaagccaatctgtgcgcttgcgctttataaaaatccttaccgggaacattcgtaacgttttaaagcactatgatgagacgctcgctgtcgtccgccactgggataacatcgaagttcgcgcaaaagatgaaaaccagcgtctggctattcgcgacgctctgacccgtattccgggtatccaccatattctcgaagtcgaagacgtgccgtttaccgacatgcacgatattttcgagaaagcgttggttcagtatcgcgatcagctggaaggcaaaaccttctgcgtacgcgtgaagcgccgtggcaaacatgattttagcagcattgatgtggaacgttacgtcggcggcggtttaaatcagcatattgaatccgcgcgcgtgaagctgaccaatccggatgtgactgtccatctggaagtggaagacgatcgtctcctgctgattaaaggccgctacgaaggtattggcggtttcccgatcggcacccaggaagatgtgctgagcctcatttccggtggtttcgactccggtgtttccagttatatgttgatgcgtcgcggctgccgcgtgcattactgcttctttaacctcggcggcgcggcgcatgaaattggcgtgcgtcaggtggcgcattatctgtggaaccgctttggcagctcccaccgcgtgcgttttgtcgctattaatttcgaaccggtcgtcggggaaattctcgagaaaatcgacgacggtcagatgggcgttatcctcaaacgtatgatggtgcgtgccgcatctaaagtggctgaacgttacggcgtacaggcgctggtcaccggcgaagcgctcggccaggtgtccagccagacgctgaccaacctgcgcctgattgataacgtctccgacacgctgatcctgcgtccgctgatctcttacgacaaagagcacatcatcaacctggcccgccagattggcaccgaagactttgctcgcacgatgccggaatattgtggtgtgatctccaaaagcccgacggtgaaagcagttaaaagcaagattgaagcggaagaagagaagttcgacttcagcattctcgataaagtggttgaggaagcgaataacgttgatatccgcgaaatcgcccagcagaccgagcaggaagtggtggaagtggaaaccgtcaatggcttcggcccgaacgacgtgatcctcgatatccgttctatcgatgaacaggaagataagccactgaaagtcgaagggattgatgtggtttctctgccgttctataaactgagcaccaaatttggcgatctcgaccagaacaaaacctggctgctgtggtgtgagcgcggggtgatgagccgtctgcaggcgctctatctgcgcgagcagggctttaacaatgtgaaggtatatcgcccgtaatttgtggtttttacgtcgcatctggtcagatgcgacgtttgccgcatccgacattactcgtaataattataaatccctgccgccatcaccagttgacttgccacttcatgggctttttcacgcccaaccaacaggtcgataattttcagaccaaagtcgatagctgtacccggcccctggctggtcagcaattttacccgtgcatcccagacgacgcgcttgtccagccattgttcggcgggaattttgtctttcagcgtcgggaagccggtcatattaccaatcgggaagatatcgtgcggcaccagcacggtggctggcgcggcgcaaatagccgcgacgatacgcccggaacggtggaactgtttaacggtttcaaccagcagagtgctatcgcgaaaacactccgcgcctttaatgccaccaggcagcacgatcacgtcatattcgccatcagccacttcgaccagcggcgcatccgccagcagcttcacgccgcggctgcaggtaatcgccaggttaccatcgctggcgacgctggcagtggtgactttgataccgccgcgaaccagcagatcgatagtggtgacggcttcagtctcttcactaccaggggcgaggcaaaccagtgcgcttgcgctcatattcactctcctttctttttttaattaccaggggcgaggcaaaccagtgccgatgcgctcatattcactctcctttctttttaccatttcaaacaggcgggtgttttccggtacggcaatcccatgcgcgcgggcgcggcgtaagagaaaaccattgatatagtcgatttcagtgtggcgcagcgcgcggatatcctgcaacatgctgctgatattttccgctgtggcatcaatcacctgcatcacgtaatcacgcaaatcttctgcactagtatgatgcccttcgcgttcgatcaccgccgcgacttcttcgcatatctgcataatttcttgcggatgatgacgtaattcaccgttcgggcaattccagatggcagtcagtggattaatcacgcagttgactgccagcttgcgccacagctcggcgcgaatattgttatgccaggcaacgtcaggcaacacggtttgcaaaatatccgccagataactgtaatccccgtcctgttgccgtgccgggccaatatgcgtgataccgtttgccacatgaataatgacattgccgtcgcggcgggctgcatgggtggtggtgcccatcagtaatggctgctgaatgttttgcaactcttcgatggtgcccatgccgttgtgaattaacagtattggcgtagttacaggcagtgtggacgcgaggcttttgacggcatcggaaacctgccatgctttcagcgtcaccaggagcagatcgctggtggcgagaaaatcgggatcgttggcggtcaggctttcgttaaatatgctaccatctgtctcaaccagattcacgctacaataaggttgcggtacgcgcagccagccctgaacttcatgaccctgtttgcaaagtgctgtaagccataattgccctaaggcaccgcatcccaatacggtaattttcattgttcctcctcacccgcaaccactccgggtgttcaataaggctatcccttaattgtgcatgctgttgcgactatgcacaattaagggatacgtcctggtgcaggactgtcggttatttaactttgcgggtattatgcttcgcatcaaaaatgaagggagaggaaaagatgccatctttcgatattgtctctgaagttgatcttcaggaagcacgtaacgcggtcgataacgcgagccgcgaagtggagtcccgttttgacttccgtaacgttgaagccagttttgagctgaacgacgccagcaaaaccatcaaagtgttgagcgagtccgatttccaggtcaatcagttgctggatattctgcgtgccaagctgctgaagcgcggcattgaaggcagtagcctggatgtaccggagaatatcgttcatagcggtaaaacctggtttgtggaagcgaaactgaaacagggcattgagagcgcgacccagaagaaaatcgtcaagatgatcaaagacagcaaactgaaagtgcaggcgcaaattcagggcgatgaaatccgcgtaacgggcaaatctcgtgatgatttgcaggctgtcatggcgatggtacgtggtggcgatctcggtcagccgttccagttcaaaaacttccgcgattaatcgcgactatgtgcgttttgttcatgtcagatgcggcatgaacgcctgattcggcctacaaaggtttgtaattcagaaactttgtaggcctgataagcgtagcgcagcaggcaattcgccgcgttttttatgcctgacgaattgcctgttctatctcaaagcgattcgtcactttgctgtcgattttcacataagcactatgttcttcttctgcaatcaacacttctttgatgccttcagtttctagcaaacgcacttttaacgcctcgtttgcggcaatgttcgccgggatttcaatgcgcaaactgctgacatacggcggttctttcatggtactggcgactgtcagccacactgcggccagcattgcgccagcgagaaataccccctgaccgtcaaacatgccgttaatccagccgcccaggctaccgccaatcgccacgccaagaaactggctggtggagtaaacacccatcgccgtacctttgtaacctgctgggctctctttactgataagactgggcaggagggcttccatcaaattaaacgccacaaagaaaagctgcacgccgaccaccagttgccagaactgcgtttgcgcgttccacaacacaatttccgcaaccacgatcaacccgacgcagaagacaaagacttgcttcattttgcgcttaacttcagcgtagataatgaaaggcacgacgctgccaaaggcgattagcattgtcgccagatagaccttccagtgttcagccgccgggaaccctgcatcagccagttgtccgggcagggcaacaaacgtgctcatcagcaaaatatgcagacacataatgccaaagttgagtttcagcagccgcggttccgccagcactttactgaaactgcctttcaccattccggactcacgattaagtacgtgagtgctactgttgggcacaacccaaatggtcaacgcaatgccggtcgttgccagaatagcgatcatccagaacagcgcgtgcagcccaagtttgtgagtgatgatcgggccaagcaccatcgcaatggcaaaggtaatgccaaagctcacgccgataaacgccatcgctttggtgcggttttgttcgcgcgtgagatcggaaagcagcgccataacggcggcggcaattgctccagagccttgtagcgcccggcccagaataattccccagatggagtcggaaagcgcagcgataacgctaccggcggcaaacaccgccagcccaccgacaattaatggtttgcgaccaatgcggtcggaaagcaggccaaacggaatctgaaaaacggcctgagtcagaccataaataccaatggcaataccgattaatgcttcgctggcaccttgcagagccatgccgtacgtggtcagaaccggcagaaccataaacatgcccagcatgcgcaagctgaatacggtccctaaaccccaggtcgcgcgcctctcacctggcgtcattttataatcgttcattaccacctctgttttaaattcgcgactagtgtaaagcggcaaacgaatggggtaaacatgcggattttttagtaaatatttcgagagggatatgtttctaatgctaagaaaaaaggtgccgtagcacctttttaatagagaggttttgttaccacacagcagccagcagcgtatggctgtccggtaccataaaatcaacggacatcatcacgctgagggcagtgatggcgatgatagagaagccgaacagcttgcgcgcccagattctgtcatcagcaactttataaccgcgcagagccatacctaaccaccagacgctaaccgccgcggcgaccaccagatatttatacccagcgtaaccgccaagagagagcatcagcgtggcaacggcaaaggcgatgatatacagcgtgatgtgattcttcgccacgctaatgccttttaccactggcaataccggaatgtttgccgcctggtaatccttaaagcggaaaatggcgatggcataggagtgaggcatctgccacaggctgaagatagccagcaggatcgctgcgccgctatcgaactcaccggttaccgcacagtagccgatcaccggcggcgcagcgccggagaggctaccaatcaacgtgccgtagacagagtggcgtttcatgtacaggctataaacgccgacataaaccacaaagcccatcacccccagccagcaggccagcggattcgcgccaaaccacagcagcataaagccagcaatacccagcaacgtggcgtacaccaggctgacagcaggagagatcaggcctttcaccagcacccgattcttcgtcctttccatctttctgtcgatatccctgtcgatgtagttgttaaacacacaaccgctcgccacaaccagactcaccccaaccagcgtgtagataaacaggggataatcaatgctgcccttactggccagcaggaatcccccaatcacgctgatcaggttgccaaagatgatgcctggtttcgttacttgcaggtattgcttaaacatcataaccgccgctcttagtgcatcatcatgttgtagttgaggttccacataatccagatggagcctacaaccaggatagcgatgattagcacggtgaagacaaacgccgtcatgttccagccttcatcacttttggtattcatgtgcaggaagcacaccagatgcaccagaacctgtaccactgccattgccaggattgttcccagaattacggccggagaggcagctcctgtcatcaccatccagaacggaatcaccgtcagaatgatgctcaggataaagcctgtcatgtaggtttttacgctgccatgggacgcgccgctgtgatcggtagaatgactcattacatcgcccccatcagataaacaacagtgaacacacagatccaaaccacatccaggaagtgccagaacaggctcaggcacatgatgcgggtacggttagtgctggtcaggccgcgacgggcgatttgcaccatcagcaccgccatccagataagaccagaagtgacgtgcagaccgtgcgtgccgaccagcgcaaagaacgcactcaggaagccgctgcgatccggacccatgccgttaacaatcaggtgatggaattcatagatttccatcccgataaatccggcaccaaacaaccaggtcaacgccagccaggagataacctggcttttgttgtttttgtacatggcgatagccgccatgccgtaggtgatggagctgaacaacagcaagaaagtttcaaccagaacgaacggcagttcgaaaatgtccttacctgtcgggccgcctgcggtgccgttcaccagaacggcataggtagcaaacaagatagagaacagaatgcagtcgctcatcaggtagatccaaaatccgaagattttggttccgcctgcatcgtggtgcccgtgttcgtgcgcgtgggcagtcgcgtgcgtcaaagtatcagttgccatttttcagccctgccttagtaatctcatcgaaatgctggttttccagtttttcgatttctgccaccggcacgtagtaatccacgtcctcgtcgaagcttttcacgatccaggtgatgatcatgcctgcgaagccaacaatcgccagccaccagatatgccagatcatggcgaaaccgaagatggtggagaaagctgcaatgacgatacctgcaccgctgtttttcggcatatgaatttcttcatagtggtcaggctttttatacgcttcgcctttctctttcatttcccagaatgcatcacgttcgtgaacgtgcggcactacggcaaagttatagaacggaggcggggaagaggttgcccactccagcgtacggccaccccacgggtcgccagtcaggtcacggttctggtcgcggtcgcgaatagaaacgtacatctgaataacgaggcagagaatacccagcgcaatcagtactgcaccgctggctgcaatcatcagcatggtgtggaactgcgggtcaatctgctggctcaaacgacgggtcatgcccatgaagcccagcgcatacagtggcataaaggcaacgaagaagccgatgatccagaaccagaacgcgcgtttaccccaggtttcgttcagtttgaaaccgaacgctttaggccaccagtaggtcatccctgcgaagcagccgaagaccacgccgccgatgatcacgttatggaagtgcgcaatcaggaacaggctgttatgcagaacgaagtccgcgcccggtacggccagcagcacgccagtcatcccgcccacgctgaaggtgacgataaaaccgatggtccacagcatcgcagaatggaacacgatgcggccctgatacatggtgaacagccagttgaagatcttcaccccggtcgggatggcgataatcattgtggtgataccaaagaaggcgtttacgttcgcgcccgcacccatcgtaaagaagtggtgcagccaaacgatgaagctcagcacggtgatacagacggttgcccataccaggctggtataaccaaacagacgtttacggctgaaggttgccgcaatttcggagaacacaccgaaaacaggcaggatcaggatgtaaacttccgggtggccccaggcccaaatcaggttgatgtacatcatcatgttgccacccatatcgttggtaaagaaatgggtgcccagatagcgatccagggtcaacaacgcgacggtaaccgtcagaattgggaaggaagcaataatcagtacgttcgcgcacagacttgcccaggtaaatactggcatcttgaacatggtcatgcccggtgcgcgcatcttcagaatggtaacgaagaagttgataccggtaagcgtcgtacctataccggatagctggagactccatatccagtaatcgacaccgactcccggactgtactctattccgcttagcggtggataggccagccagccggtctgcgcaaattcgcccacgccgagagaaacgttaaccagaatcacaccaacaacggtaaaccagaagcttaagttgttgaggaacgggaacgcaacgtcacgcgcgccgatctgcagcggaaccaccaggttcatcagaccgataacgaaaggcatcgccacgaagaagatcataatcacgccgtgcgcggtaaagatctgatcgtagtggtgaggtggcaggaagcccgcttcgcccgcgctggcaagagcctgctggctacgcatcataatggcgtcagcaaaaccacgcagcaacatcacaatcgccacgatgatatacatgataccgaggcgtttatggtcgacggaggtcagccactctttccacaggtaggtccacttaccgaagtaagtgatcaggccaacgagcgccagacctcccaaaataatgccagcgatcgtaaccatgacgataggttcatggaacgggactgcatcaagacttaattttccgaacatctttattcttcctcaacccctttaatgggcggattccgcgtggctcatgtccatgccttccataccttcgtgtgcgctgtgctcaccttctggctgggtcatgtccatgctcttaccgtgagccataaacttgttaattacatcggcaaacaagtctggtttcacgttggagaaatattccacctggttgtattcgctaggcgcggccagtttttcgaacgcagccatgtcagacatggtgttcgggctctgcttcgcttttgcgacccactggtcgaatgcggcgcgatccggtgttgcaatagctttgaacttcatgccactgaagcccgggccgctgtagctggcggagataccgtcataagtgccgggttcgttggcgatcagatgcaggcgagtctgcataccggccatggcataaatctggctacccagacgcggaatgaagaaggagttcatcacggagttggaggtcactttgaagtacaccggagtgttcgccgggaaagcgatttcattcacggtagcaatgccctgttccgggtagatgaagaaccatttccagtccatggaaaccacttcgatggtaatgggcttctcgtcgtgtgccagcggcttgctaggctcaagagcgtgagtggttttccaggtcagtactgcaaggaagatgatgattaagataggtaccgtccagaccacagcttccactttattggagtgactccagttcgggctgtacttagcatctttattgctcgcacggtacttccaggcgaaaccaacagccatcaagattgcgggaataacgacaatcaacatcaggccaaatgccgtcagtatcagactacgttgctccagaccaatctgtcctttgggatctaacagcgcagaattacagccactgagcaatacagtgcctgcaaataaactcaaccatcccaaacttttattgtatttcctgagtctcatttaacgacctcaattccacgggatctggtggcgtttaaagtgtgtgggcattttacgggaaggttacattactgtaaacatgattaaattcctgttacttggatttggctgccaggtcacatatgttgcaaaacatatcaggttgattttaagaagctgttgcaaaagggcgttataacaaaaggggagtgctgaaggagtctgggcgggcaattggtataaccaatgtgaaataaaacaattatttaacaaataattatcattagagtgacaactgggtgatgagaaaataaagactcattagctgaatcgtgtaagaaaaatagaatttataaatggcgccaataatttccaaacgctaagccgcacaaaagaacaaatattaataagcgatactgatgtttatttagccgtaataattacggcgagtgattactacagctaaataatatttacagattacgtcagatgcgtttttcgtagcgccagataatccagcaaaccaccaagcacgacgccagaaagggcgactaaaaccccgacttccagcagagcaggcaggaaagagaagtgcgtcaaatccagcgcgtccatcgtcaatagcagtaaccacacggccaacaggctgacgcccgccgccagtgtccacatggcaaaggcataacctgccggatatgcggtacgggagataaagttgtcatttactcgtgtatattcaagcgtctggcggcaaaccagcagcaaaataagccctggtacggcagcggcgacggagaatagatagaatgtgctccagccgtgtgcttcaacaaaccaacccgccacggggccgacataaactcgccctacagcagaaagcgcactgagcagggcaaattgagtagcggaaaaactcttattacatagcgtcattaacagcgcgacaaaggcacttgtgcccatcccgccacagaggttttcgaaaaagacggctgcgcccatgctgtagagatgcttatcagtaatgctcagcagccagtaaccggcgttagacgcaccttgtaaaatgccgaaaatcagcagtgcccggaacagactcaggcgctgcatcaaaatcccaccgtacaatgcgccaacaatggtcgctagtaagccaagcgttttgttaaccacgcctacttcacccgcatcaaacccgacgccgcgaatcaaaaacgtggttgtcaggctcatggcgaatgcgtcgcccagcttatacagcacgataagaagcaaaataagccaggcattattgcgaccaaagaaatctcgcagaggtgcaacaaccgcttgttccagcgttttgggcacaggaatggtgtcggttggttctggtgcaagcaacgtcgcgataatacaggggatcaacagtgccgccattaaccagtacatgccctgccagcccagccatttatctgccagccacagggctaggccgccggaaaccagcatccctaaacggtaacccagcacgctgattgccgcgcccgcaccacgttcttctgccggaagcacatcggttttccacgcatcgaagactatatcctgggaagcagagcaaaaagcgatcaccactgccagcgccgccatccagcggagttgggtgcctggttcgagaaaacccatcgccgcaatggcgactaataacaggatttgcgtggcgagcagccaaccgcgccgccgcccaaaaaatggaggcgtgtagcggtccatcagcggactccagaggaatttaaaaacgtaagcctggcctaccagagagaagaaaccaatggttttgagatcgatattctcgaccgtcatccaggcctgtaaggtaccggatgtcagggcgagcggtagcccggaagcaaaacccaggatcagcaatatggcactacgcggctgttgaaaaatacgtaaatattgactggacatgggcgtctacaggcccggcttgcaccgggccagagggcagaaattaacgcgcgttctgcttgatgaattcgtggatgctggtgtcctgagacatatcagcgatggtatcggtcagcacactgttaaccgcatcggcgatatttttgttggaggcctggaacgcaccttcaacgttgtagctggcacgatagtttttggtcattttgttgccattctgcgcggtagcgatgatggcgatatccgctttggtcgcgatgttgtagcgcacgttgccctgggacacgtcagcatacagttggctaacgatgatttgcagattaaccgggccattcggaccaaccatgtaaccacgcgcggtcatctgtttttccagcacttcttgcagcaggaaacgcagatcgcgggaggcggtcagggtaacgatttgattatcgcgggtgacttttgccagcgcctgatcggtacgctgatcggcaccattaatgcttacggtgacgcccatcaggcttggatcctgctgtggcagtgtaatcgtcggggaaacttcaatagttgttggcggttttgcgcatcctgcaagcataaacagagcaactaacgggaagaggatttttttgaacatgttcgggctctcagagactcttaagcgtgtttggtaaaaattcccgccatcataacattgccaacggcgaggggaagtgggtaaggcatgtaaattcatcatgttgacgaaataatcgcccctggtaaaagaaacactgatgcgaggcctgtgtttcaatctttaaatcagtaaacttcatacgcttgacggaaaaaccaggacgaaacctaaatatttgttgttaagctgcaatggaaacggtaaaagcggctagtatttaaagggatggatgacatctcagcgttgtcggaggagatatttcatgatgatacgtgagcggatagaagaaaaattaagggcggcgttccaacccgtattcctcgaagtagtggatgaaagctatcgtcacaatgtcccagccggctctgaaagccattttaaagttgtgctggtcagcgatcgttttacgggtgaacgttttctgaatcgtcatcgaatgatttacagtactttagcggaggaactctctactaccgttcatgcgctggctctgcatacttacactattaaggagtgggaagggttgcaggacaccgtctttgcctctcctccctgtcgtggagcaggaagcatcgcgtaaaaacgcatttgcaactgtcggcgcttttccagtatgttgctaaagattttatgaaaaacggcctgcgggccgttttgttttgtctggattttgcgctttttgcccagcattcagacgaaaattgcccgggaattgtgaaaaaatacgcgacagcgcgcaataaccgttctcgactcataaaagtgatgccgctataatgccgcgtcctatttgaatgctttcgggatgattctggtaacagggaatgtgattgattataagaacatcccggttccgcgaagccaacaacctgtgcttgcggggtaagagttgaccgagcactgtgattttttgaggtaacaagatgcaagttagtgttgaaaccactcaaggccttggccgccgtgtaacgattactatcgctgctgacagcatcgagaccgctgttaaaagcgagctggtcaacgttgcgaaaaaagtacgtattgacggcttccgcaaaggcaaagtgccaatgaatatcgttgctcagcgttatggcgcgtctgtacgccaggacgttctgggtgacctgatgagccgtaacttcattgacgccatcattaaagaaaaaatcaatccggctggcgcaccgacttatgttccgggcgaatacaagctgggtgaagacttcacttactctgtagagtttgaagtttatccggaagttgaactgcagggtctggaagcgatcgaagttgaaaaaccgatcgttgaagtgaccgacgctgacgttgacggcatgctggatactctgcgtaaacagcaggcgacctggaaagaaaaagacggcgctgttgaagcagaagaccgcgtaaccatcgacttcaccggttctgtagacggcgaagagttcgaaggcggtaaagcgtctgatttcgtactggcgatgggccagggtcgtatgatcccgggctttgaagacggtatcaaaggccacaaagctggcgaagagttcaccatcgacgtgaccttcccggaagaataccacgcagaaaacctgaaaggtaaagcagcgaaattcgctatcaacctgaagaaagttgaagagcgtgaactgccggaactgactgcagaattcatcaaacgtttcggcgttgaagatggttccgtagaaggtctgcgcgctgaagtgcgtaaaaacatggagcgcgagctgaagagcgccatccgtaaccgcgttaagtctcaggcgatcgaaggtctggtaaaagctaacgacatcgacgtaccggctgcgctgatcgacagcgaaatcgacgttctgcgtcgccaggctgcacagcgtttcggtggcaacgaaaaacaagctctggaactgccgcgcgaactgttcgaagaacaggctaaacgccgcgtagttgttggcctgctgctgggcgaagttatccgcaccaacgagctgaaagctgacgaagagcgcgtgaaaggcctgatcgaagagatggcttctgcgtacgaagatccgaaagaagttatcgagttctacagcaaaaacaaagaactgatggacaacatgcgcaatgttgccctggaagaacaggctgttgaagctgtactggcgaaagcgaaagtgactgaaaaagaaaccactttcaacgagctgatgaaccagcaggcgtaatttacgcagcataacgcgctaaattcgcacaaaggcccgtcaccgccaggtggtgggcttttttttgtcatgaattttgcatggaaccgtgcgaaaagcctctttcggtgttagcgtaacaacaaaagattgttatgcttgaaatatggtgatgccgtacccataacacagggactagctgataatccgtccataaggttacaatcggtacagcaggttttttcaattttatccaggagacggaaatgagttacagcggcgaacgagataactttgcaccccatatggcgctggtgccgatggtcattgaacagaccagtcgcggtgagcgctcttttgatatctattctcgtctacttaaggaacgcgtcatttttctgactggccaggttgaagaccacatggctaacctgattgtggcgcagatgctgttcctggaagcggaaaacccagaaaaagatatctatctgtacattaactccccaggcggggtgatcactgccgggatgtctatctatgacaccatgcagtttatcaagcctgatgtcagcaccatctgtatgggccaggcggccagcatgggcgctttcttgctgaccgcaggggcaaaaggtaaacgtttttgcctgccgaatagccgcgtgatgattcaccaaccgttgggcggctaccagggccaggcgaccgatatcgaaattcatgcccgtgaaattctgaaagttaaagggcgcatgaatgaacttatggcgcttcatacgggtcaaagtttagaacagattgaacgtgataccgagcgcgatcgcttcctttccgcccctgaagcggtggaatacggtctggtcgatagcattctgacccatcgtaattgatgccagaggcgcaactgtgccgctatacttatccagggcggcacaacgctgtaagcggcttgcgcctgagaatggcatttgcgtcgtcgtgtgcggcacaaagaacaaagaagaggttttgacccatgacagataaacgcaaagatggcagtggcaaattgctgtattgctctttttgcggcaaaagccagcatgaagtgcgcaagctgattgccggtccatccgtgtatatctgcgacgaatgtgttgatttatgtaacgacatcattcgcgaagagattaaagaagttgcaccgcatcgtgaacgcagtgcgctaccgacgccgcatgaaattcgcaaccacctggacgattacgttatcggccaggaacaggcgaaaaaagtgctggcggtcgcggtatacaaccattacaaacgtctgcgcaacggcgataccagcaatggcgtcgagttgggcaaaagtaacattctgctgatcggtccgaccggttccggtaaaacgctgctggctgaaacgctggcgcgcctgctggatgttccgttcaccatggccgacgcgactacactgaccgaagccggttatgtgggtgaagacgttgaaaacatcattcagaagctgttgcagaaatgcgactacgatgtccagaaagcacagcgtggtattgtctacatcgatgaaatcgacaagatttctcgtaagagtgacaacccgtccattacccgagacgtttccggtgaaggcgtacagcaggcactgttgaaactgatcgaaggtacggtagctgctgttccaccgcaaggtgggcgtaaacatccgcagcaggaattcttgcaggttgatacctctaagatcctgtttatttgtggcggtgcgtttgccggtctggataaagtgatttcccaccgtgtagaaaccggctccggcattggttttggcgcgacggtaaaagcgaagtccgacaaagcaagcgaaggcgagctgctggcgcaggttgaaccggaagatctgatcaagtttggtcttatccctgagtttattggtcgtctgccggttgtcgcaacgttgaatgaactgagcgaagaagctctgattcagatcctcaaagagccgaaaaacgccctgaccaagcagtatcaggcgctgtttaatctggaaggcgtggatctggaattccgtgacgaggcgctggatgctatcgctaagaaagcgatggcgcgtaaaaccggtgcccgtggcctgcgttccatcgtagaagccgcactgctcgataccatgtacgatctgccgtccatggaagacgtcgaaaaagtggttatcgacgagagcgtaattgatggtcaaagcaaaccgttgctgatttatggcaagccggaagcgcaacaggcatctggtgaataattaaccattcccatacaattagttaaccaaaaaggggggattttatctcccctttaatttttcctctattctcggcgttgaatgtgggggaaacatccccatatactgacgtacatgttaatagatggcgtgaagcacagtcgtgtcatctgattacctggcggaaattaaactaagagagagctctatgaatcctgagcgttctgaacgcattgaaatccccgtattgccgctgcgcgatgtggtggtttatccgcacatggtcatccccttatttgtcgggcgggaaaaatctatccgttgtctggaagcggcgatggaccatgataaaaaaattatgctggtcgcgcagaaagaagctagtacggatgagccgggtgtaaacgatcttttcaccgtcgggaccgtggcctctatattgcagatgctgaaactgcctgacggcaccgtcaaagtgctggtcgaggggttacagcgcgcgcgtatttctgcgctctctgacaatggcgaacacttttctgcgaaggcggagtatctggagagcccgaccattgatgagcgggaacaggaagtgctggtgcgtactgcaatcagccagttcgaaggctacatcaagctgaacaaaaaaatcccaccagaagtgctgacgagcctgaatagcatcgacgatccggcgcgtctggcggataccattgctgcacatatgccgctgaaactggctgacaaacagtctgttctggagatgtccgacgttaacgaacgtctggaatatctgatggcaatgatggaaagcgaaatcgatctgctgcaggttgagaaacgcattcgcaaccgcgttaaaaagcagatggagaaatcccagcgtgagtactatctgaacgagcaaatgaaagctattcagaaagaactcggtgaaatggacgacgcgccggacgaaaacgaagccctgaagcgcaaaatcgacgcggcgaagatgccgaaagaggcaaaagagaaagcggaagcagagttgcagaagctgaaaatgatgtctccgatgagcgcagaagcgaccgtagtgcgtggttatatcgactggatggtacaggtgccgtggaatgcgcgtagcaaggtcaaaaaagacctgcgtcaggcgcaggaaatccttgataccgaccattatggtctggagcgcgtgaaagatcgaatccttgagtatcttgcggttcaaagccgtgtcaacaaaatcaagggaccgatcctctgcctggtagggccgccgggggtaggtaaaacctctcttggtcagtccattgccaaagccaccgggcgtaaatatgtccgtatggcgctgggcggcgtgcgtgatgaagcggaaatccgtggtcaccgccgtacttacatcggttctatgccgggtaaactgatccagaaaatggcgaaagtgggcgtgaaaaacccgctgttcctgctcgatgagatcgacaaaatgtcttctgacatgcgtggcgatccggcctctgcactgcttgaagtgctggatccagagcagaacgtagcgttcagcgaccactacctggaagtggattacgatctcagcgacgtgatgtttgtcgcgacgagcaactccatgaacattccggcaccgctgctggatcgtatggaagtgattcgcctctccggttataccgaagatgaaaaactgaacatcgccaaacgtcacctgctgccgaagcagattgaacgtaatgcactgaaaaaaggtgagctgaccgtcgacgatagcgccattatcggcattattcgttactacacccgtgaggcgggcgtgcgtggtctggagcgtgaaatctccaaactgtgtcgcaaagcggttaagcagttactgctcgataagagtttaaaacatatcgaaattaacggcgataacctgcatgactatctcggtgttcagcgtttcgactatggtcgcgcggataacgaaaaccgtgtcggtcaggtaaccggtctggcgtggacggaagtgggcggtgacttgctgaccattgaaaccgcatgtgttccgggtaaaggcaaactgacctataccggtagcctcggcgaagtgatgcaggagtccattcaggcggcgttaacggtggttcgtgcgcgtgcggaaaaactggggatcaaccctgatttttacgaaaaacgtgacatccacgtccacgtaccggaaggtgcgacgccgaaagatggtccgagtgccggtattgctatgtgcaccgcgctggtttcttgcctgaccggtaacccggttcgtgccgatgtggcaatgaccggtgagatcactctgcgtggtcaggtactgccgatcggtggtttgaaagaaaaactcctggcagcgcatcgcggcgggattaaaacagtgctaattccgttcgaaaataaacgcgatctggaagagattcctgacaacgtaattgccgatctggacattcatcctgtgaagcgcattgaggaagttctgactctggcgctgcaaaatgaaccgtctggtatgcaggttgtgactgcaaaataatgacctcgcgcaaaatgcactaataaaaacagggctggcaggctaattcgggcttgccagcctttttttgtctcgctaagttagatggcggatcgggcttgcccttattaaggggtgttgtaaggggatggctggcctgatataactgctgcgcgttcgtaccttgaaggattcaagtgcgatataaattataaagaggaagagaagagtgaataaatctcaattgatcgacaagattgctgcaggggctgatatctctaaagctgcggctggccgtgcgttagatgctattattgcttccgtaactgaatctctgaaagaaggggatgatgtagcactggtaggttttggtacttttgccgttaaagagcgtgctgcccgtactggccgcaacccgcagaccggtaaagagatcaccatcgctgctgctaaagtaccgagcttccgtgcaggtaaagcactgaaagacgcggtaaactaagcgttgtccccagtggggatgtgacgaagttcaagggcgcatctactgatgtgccttttttatttgtattcggtgactttctgcgtcttgtgggctgacaattgcccccgtttcttgtcacaataggcctttgcgcgcatcgatacgttgcgtgaggtacacagtcatctacagcggagtgttgttacaccatgatggacagcttacgcacggctgcaaacagtctcgtgctcaagattattttcggtatcattatcgtgagcttcatattgaccggcgtgagtggttacctgattggcggaggcaataactacgccgcaaaagtgaatgaccaggaaatcagccgtgggcaattcgagaacgccttcaacagcgagcgtaatcgcatgcagcaacagctgggcgatcaatactccgagctggcagcgaacgaaggctatatgaaaaccctgcgtcaacaggtgctgaatcgtctgatcgacgaggcgctgctggatcagtacgcacgtgagctgaaactgggtatcagcgatgagcaggttaaacaggcgattttcgcgaccccagccttccaggttgacggcaaatttgataacagccgctataacggtatcctcaaccagatggggatgaccgccgatcagtacgcccaggcgctgcgtaaccagctcactacccaacagctgattaacggcgttgccggtaccgattttatgctgaaaggtgaaaccgacgagctggcggcactggtcgcgcaacaacgcgtggtgcgtgaggcgactatcgatgttaacgcgctggcggcgaagcagcctgtgaccgaacaggagattgccagctactacgaacaaaacaaaaacaatttcatgacgccggaacaattccgcgtgagttacatcaagctggatgccgcaacgatgcagcaaccggttagcgatgcggatatccagagctactacgaccagcatcaggatcaattcacccagccgcagcgtacccgctacagcatcatccagaccaaaactgaagatgaagcgaaagcggtacttgatgagctgaataaaggcggtgattttgctgcattagccaaagaaaaatctgccgatattatctctgctcgtaacggcggcgatatgggttggttagaagatgccactatcccggacgaactgaaaaatgctggtctgaaagaaaaaggccaactgtctggtgtcatcaaatctagcgtcggtttcctgattgtacgtctggacgacattcagccagcgaaagtgaaaagcttagacgaagtacgtgacgacattgcggcgaaagtgaaacacgaaaaagccctcgatgcgtactacgcgctgcagcagaaagtgagcgatgcggcaagcaacgacaccgagtctctggccggtgcagagcaagctgccggcgttaaagccactcagacgggttggttcagcaaagataacctgccggaagagttgaacttcaagccggttgccgacgctatctttaacggcggtctggtaggtgaaaacggcgcgccgggcatcaactctgacatcatcaccgtagacggcgaccgcgcattcgtgctgcgcatcagcgagcacaaaccggaagcggtgaaaccgttggcagatgttcaggaacaagttaaggcattggttcagcacaacaaagctgaacaacaggcgaaagtggatgctgagaaactgctggttgatttgaaagccggcaaaggtgcggaagctatgcaggctgccggtctgaaatttggcgagccgaaaaccttaagccgttccggtcgtgacccgattagccaggcggcgtttgcactgccactgccagcgaaagacaaaccgagctacggtatggcgaccgatatgcaaggtaatgtggttctgctggcgctggatgaagtgaaacaaggtagtatgccggaagatcagaaaaaagcgatggtgcagggtatcacccagaacaacgcacaaatcgtctttgaagctctgatgagtaacctgcgtaaagaggcgaaaatcaaaattggcgatgcgctggaacagcaataatcctgaagccgcctcgcaaaaaaatgcgttgcagctgtaacaagaaaaggtcgctttcgcggccttttccatttctgaacattgccatttgtttactgttttcactgccgttaaggtgattccactgttaacaaacaaggagaaaacagtatgaaacacggaattaaagcactgctcattaccctgtccctggcctgtgccggaatgtctcatagcgcgctggcggcagcttctgtggcgaaaccgacggcggtagaaaccaaagcggaagctcctgcagcacaaagtaaagcagcagtaccggcgaaagccagtgacgaagaaggcacccgggtcagcattaataatgccagcgcggaagagctagcccgcgcgatgaatggcgttggcctgaagaaagcgcaggcgattgtcagttatcgcgaagagtacggtccgtttaaaactgtggaggatctaaagcaggtgccggggatgggcaatagcctggtggaacgtaatctggcggtattaaccctgtaattaatttgcatagtggcaattttttgccagactgaagaggtcataccagttatgacctctgtacttataacaacaacgtaaggttattgcgctatgcaaacacaaatcaaagttcgtggatatcatctcgacgtttaccagcacgtcaacaacgcccgctaccttgaatttctcgaagaagcccgctgggatgggttggaaaatagcgacagttttcagtggatgacggcccataacatcgccttcgtcgtggtcaatatcaatattaactatcgtcgcccagcggtattaagtgacctgttaactattaccagtcagttgcagcaattaaacggtaaaagcggcatcttaagccaggtcattacactggagccggaagggcaggtggtagcggatgcgcttattacgtttgtttgtattgatcttaaaacgcagaaagcattagctctggaaggggaattgcgcgaaaagctggagcagatggttaagtaaacgttttgtggtgccggatgctcaagccgcatccggcgacacccggaataattacctcaacccggttttctgcttcatcgctgccatcaccgtcggtttatcggccagataatgattcaaaccgttggcgcgtaaattacatgccgcacaatgaccgcaaccgtcgcctttaaagccgttatagcaggtcaacgtttcgttacggactaaatccagtttgccgtaataatctgccagcgcccaggtttccgctttatcaatccacatcagcggcgtttcaaaacgaatatctttcgccatgcccaaactgacggcatggtttagtgctttcacaaactcatcgcggcaatccgggtagccggagaaatccgtttcgcagacgccagtaattacggcttctgcttttacctgatacgcatatattgccgccagcgtcaggaacaaaatattacgccctgggacaaacgtattcgggataccatcggcttcaggttcataatcaggcaccggaatgctgtcacgcgtcaggctactgaccgccagctcgttgagcagggtgacatccagcaccttatgcgcgcgtgcccccagtttcagcgccagttcgcgtgccacgtcgatttctgcgcgatgccgctgaccgtaatcgaacgtcacgcaatggacttcatcatattgttgtaatgcctgcaccagacaggtggtggaatcctgacctccactgaacacaacgacagcacgtttcatagataatcctgcttgaacaataaaagcgttatggtaacgcctgcgattaacccggaccagctattcattggcttggcgcgggaagccaggcttcggtaaattcaaaccagccgcgcggtgtcagtcgcacaccgttcacgccgggaggggcactaatgcgatagtgatagttgaacagcggcgtcagcgtcgcatctgtcattaactggctaaaaaccgctttcagggcattaaatcggttttcttcatcaggcattatttgcacggcatccagtgtgctttgtagatgtgcgtatgctggagcgtcgaaaacatgtggccacagcggatcgcagcgcagccattgctccagagtatattccggtgcttcgccaattaatctgtcgcccatcatgaggtctgcgtgtgcctgtagggtcgtgtcgtcccagttttttgcgttatgaaaaataattgtgagttcacagccttccgctgccagtgtcgcctgtaggcgttctgccatggtatgaagttctatcggtaggtgataaaccagcgtcaaggttttcggtagtttgacttcatccggtacctgccaatgcggaatagtccagcctggcagtaatgcatgactggcggtgatcaggttttctccgacttctaacgtttgtaataaaccggattgatgaataatggagatcacttttcgcgcctgccagagggagagtcggggacttttgcgcaacgtcaaatagcaaaaacctaaactgatgccgctactgacctggctgacccgttgcagctcctccggtttgccgatggtgatttgcacgggatgccgacaactggttcccaaatctttttcgaaaagcggcggagttatccagtactcaaccgctttaagcagcggatgacgtaaatggtaataatcatggctttccaggcgcaccagctctgctgtgaattgtgttaagcgaaaaggacccgtgccgatcagtgggaattgcggatgcgccagatggctgcaatagctcgccagccggtgcgcaagccagtaatcagggcgatgtaaaaagaaggtcagacactgcggatgggtgacttcaatacgcttcacgctaataaataattgatccagtgctggcagttgtaacagcatcaataatcgctggtgtaagtgactggcttttactgcatcgccgttatgccagtgtagggtactacgaagataaaagtcccagcgtaacccgtcagtagaggtttcccagtgatgcgctaaatcgccaatcgggcgctgagtattattatcgaagcgggtcaggccggaaaatatctgcccggcgagatgctgctcggcacggccgggcaaaaagcctggttgtagcggttcgagcgggcgatagtagggaatacgcaacgtgggtgtatcgttttgccattgtccgcccataaacggctgtaacagagtgcgcagctcacctggggccagttgcgccagctccagcacatcttgctgctttccggtttccagtgcctgttccatcatcgcattgcgtaggctttccggcgtgaccagaaagcgtaattgtccgcgctttccgcgtccactctgcgcctgccactccagccatcccgcctcctgtgcctgacgcaacagcgtacgaacatggcgttcgctgcaaaaacagcgttcggccagttcgctgacggtgacggtttgcggctttccggcggaaggttgccacagacgttgatactggttaagacggttgagcaatcgcatataaacccggaacaatattatttaactattcactattacttccgtatatatcaggtgatactcaatcaccattaaccgtgtcacagagtggagaaagaaatggctcgtctggcagcatttgatatggatggcactttattgatgcccgaccatcatttaggtgagaaaaccctctctactttggcgcgactgcgtgaacgcgacattaccctcacttttgccacggggcgtcatgcgctggagatgcagcatattctcggggcgctaagcctggatgcgtatttgattaccggcaacggaacgcgcgtgcattctctggaaggtgaacttttacatcgtgatgatttacctgcggatgtcgcggagctggtgctgtatcagcaatgggatacccgagccagcatgcatatcttcaatgacgacggttggtttaccgggaaagagatccctgcgttgttgcaggcatttgtctatagcggttttcgttatcagataatcgatgtcaaaaaaatgccactcggcagcgtcaccaagatctgcttctgtggcgatcacgacgatcttacacgcttgcagatccagctatacgaagcattaggcgagcgtgcacatttgtgtttttccgccacggattgcctcgaagtgctgccggtgggctgcaataaaggcgctgcattgacggtgctgacccaacatttaggtttaagcttgcgcgattgcatggcctttggtgatgcgatgaacgatcgcgaaatgttagtcagcgtcggtagcggatttattatgggcaatgcgatgccgcaactgcgcgcggagctcccgcatttaccggtgattggacattgccgaaatcaggctgtctctcactatttgacgcactggctggactatccacatctaccttattcccccgaataacgagatcccttccagcaccgggcaattgcccggttttttttgcgttgaatttgtcattttgtgccgtggtgtttaaaccgcacagaataaattgtcgtgatttcacctttaaaataaaattaaaagagaaaaaaattctctgtggaagggctatgttagataaaattgaccgtaagctgctggccttactgcagcaggattgcaccctctctttgcaggcactggctgaagccgttaatctgacaaccaccccttgctggaagcgcctgaaacggctggaggacgacggtatccttatcggcaaagtcgccctgctggatccggaaaaaataggcctcggcctgaccgcttttgtgctgataaaaacgcaacatcacagcagcgaatggtattgccgctttgtcacggtggttaccgaaatgccagaagtgctggggttctggcgcatggctggtgaatacgattatctgatgcgcgtccaggttgccgacatgaaacgctacgacgagttttataagcgtctggtaaacagcgtgccggggctgagcgacgtcacttccagcttcgcgatggaacagattaaatacaccacttctttacccatcgaataaatatccagaatcaggtcaggacacaacgcgtgcgattatttgctcaattaagctggtatttccgtcgggaatggcgtcgctatctcggggctgtcgccttgcttgtcattatcgcgatgctgcaactggttccgccaaaagtggttggtattgttgtcgatggcgtgacagaacaacactttactaccgggcagatcctgatgtggatcgccaccatggtgctgattgccgttgtggtttatctcctgcgttacgtctggcgggtattgctgtttggtgcgtcttatcaactggctgttgaactgcgtgaagattattaccgtcagctaagccggcagcatcctgagttttacctgcgtcatcgcaccggtgacctcatggctcgtgcgaccaatgacgtcgatcgcgtcgtgtttgccgccggagaaggggtgctgacgctggtggatagtctggtgatgggctgcgctgtgttgattatgatgtctacgcaaattagctggcagttgaccttattttccctgttgccgatgccagtgatggcgatcatgattaagcgcaacggcgatgctttgcatgaacgctttaagctggcacaggcggcgttttccagtcttaatgaccgcacccaggaaagcctcaccagtatccgcatgatcaaagcctttggtctggaagatcgccagagcgcgttatttgccgcggatgccgaagataccggcaaaaaaaacatgcgggtggcgcgtattgatgctcgtttcgacccgaccatctatatcgcgattggtatggcgaacttgctggcgattggcggcggtagttggatggtggtgcagggcagtttaacgctgggccagctcaccagttttatgatgtatttaggtctgatgatttggccaatgctggcgctggcatggatgtttaacattgtggaacgtggtagtgctgcgtacagccgtattcgcgcgatgctggcggaagcgccggtggtgaacgatggtagcgaacccgtgccggaagggcgtggcgaactggatgtaaatattcaccagttcacgtatccgcagactgaccatcctgcgctggaaaacgtcaatttcgccctgaaacccggtcagatgctgggtatctgcgggccgactggttccggcaaaagtaccctgttgagcctcattcagcgtcatttcgacgtcagcgagggggatattcgctttcatgatattcctctgacgaagttacaactcgatagctggcgtagccgcctggcggtagttagccagacgccattccttttttctgacactgtggcgaataacatcgcgctgggttgcccgaatgccacccagcaagagattgagcatgtcgcgcggttagccagcgtacatgacgatattttgcgtctaccgcaaggttacgatacagaggtgggcgagcgcggtgtgatgctttccggcgggcaaaaacagcgtatctccattgctcgtgcgttattagtcaacgcggaaatcctcatccttgatgatgcgcttagcgcggtggacggacgcactgagcaccagatcctgcataacctgcgtcagtgggggcagggaagaacggtaatcatcagtgcccatcgcctttctgcactgacggaagccagtgaaattattgtgatgcagcacggacatatcgcccagcgtggcaatcatgatgtgctggcacaacaaagcggctggtatcgcgatatgtatcgctatcaacaactggaggcggcgctcgacgacgctccggaaaatcgcgaggaggccgtcgatgcgtaactaaaaatcgcgaggaggccgtcgatgcgtagttttagccaactgtggccgactctcaagcgcctgttagcgtacggtagcccgtggcgtaaaccgctggggattgcggtcctgatgatgtgggttgcggcggcggcagaagtcagtgggccgctgcttatcagctattttatcgacaatatggtagcgaaaaataacctgccgttgaaagtggttgcagggctggctgcggcgtatgttgggctgcaactgtttgccgccgggctacattacgcgcagagcctgctgtttaatcgggcggcagtaggcgtagtgcaacagttgcgtaccgacgtgatggatgctgcgttacgccagccattaagcgagtttgatacccaacccgtcgggcaggtgatttcccgcgtcactaatgacactgaagtgatccgcgatctctacgttaccgtagtggcaactgtcctgcgcagtgccgcgctggtgggcgcgatgctggtggcgatgttcagcctcgactggcgaatggcactggtggcgataatgattttcccggtggtgctggtggtaatggtgatataccagcgttacagcacgccgattgtccgtcgtgtgcgcgcctatttggcggatatcaacgacggctttaacgaaatcatcaatggcatgagcgttatccagcagtttcgtcagcaggcgcgatttggcgaacgtatgggggaggccagtcgtagtcactatatggcgaggatgcaaaccctgcgcctcgacggttttctgctgcgtccgctgctgagtctgtttagtagcctcattctttgtggcttgttgatgctgtttggcttctccgccagcggcaccattgaagtgggcgtgctgtatgcgtttatcagctatcttgggcgacttaacgaaccattaatcgaactgaccacgcaacaggcgatgctgcaacaggctgttgttgctggtgagcgcgtgtttgaactgatggacggaccgcgccagcaatatggcaatgatgatcgcccgttacagagtggcaccatcgaagtcgataacgtgagttttgcttatcgcgatgacaatctggtgctaaagaacattaatctctctgtgcctagccgcaattttgtggcgctggtcgggcataccggcagtggcaaaagcaccctcgccagtttattgatgggctattacccgctaacggaaggtgagattcgccttgatggtcgtccattaagtagcctaagtcacagcgcgctgcgccagggcgtggcaatggtgcagcaagatccggtggtgctggcggataccttcctcgccaacgtgacgctggggcgggatatctccgaagaacgcgtctggcaggcgctggaaaccgtgcaactggcggagctggcgcgtagcatgagcgacggtatttacacgccgctgggcgagcaggggaataatctcagtgttgggcaaaagcaactgctggcactggcgcgcgtgctggtcgagacgccgcaaatcctgatccttgatgaggcaaccgccagcattgactccggtactgaacaggcgattcaacatgctctggcggcggtgcgtgaacataccacgctggtagtgattgctcaccgcttaagcaccattgttgatgccgacaccattctggtgcttcatcgtgggcaagccgtggagcagggcactcaccagcaactgctggcggcccagggacgctactggcagatgtatcaactgcaacttgcgggcgaagagctggcagccagcgtgcgtgaagaggaaagtttgagcgcctgaatagcgcaatatttcatcgttggtgcaaaaatgtaacgcactgtgcactgtcatagtgcgttttcattttcaaacttcttaacttcctgctctctttctcgtttttcatttctggcacaccgcttgcaataccttcttcgtgtagcagaaccattaccgaattctgaccggaggggatctatgaagctggtgaccgtgataatcaaaccattcaagctggaagacgttcgtgaagcgttatcttccattggtattcagggcctgaccgtcaccgaagtgaaaggtttcgggcgtcagaaagggcatgccgagctgtaccggggggcggaatacagcgtcaatttcctgccaaaagtaaaaattgatgtggcgattgctgatgaccaactcgatgaagtgatcgatatcgtcagtaaggcggcttacaccggaaaaattggcgacggcaaaatcttcgtcgctgaattgcaacgcgtcattcgtattcgtaccggcgaagccgacgaagcggcgctgtaatctctggcacacagcaacaggaacgaaaaatgaagatagcgacgataaaaactgggcttgctagtctggcgatgcttccgggactggtaatggctgcacctgcggtggccgataaagccgacaatgcgtttatgatgatttgtactgcgctggtgctgtttatgactattccggggattgccctgttttacggtgggttgattcgcggcaaaaacgtgctgagcatgctgacgcaggtgacggtgacatttgcactggtctgtattctctgggtggtttacggttacagcctggcgtttggtgagggcaacaacttcttcggcaacattaactggttgatgctgaaaaacatcgaactgacggcggtgatgggcagcatttatcagtatatccacgtggcgtttcagggaagctttgcctgcattaccgtcggcttgatagttggggcgctggcggaacgaatccgcttcagtgctgtgttgattttcgtggtggtatggctgacgctctcttacattccgattgcgcatatggtgtggggcggtggtttgctggcttctcacggtgcgctggatttcgcgggtggcaccgtggtgcacattaacgccgcaatcgccggtctggtgggcgcgtatctgataggaaaacgcgtgggcttcggtaaagaggcgtttaaaccgcacaacctgccgatggtcttcaccgggactgccattctctatatcggttggtttggctttaacgccgggagtgcgggcacggcgaatgaaatcgcggcactggcatttgtgaatactgtggtcgcaacggcggcggcaattcttggctggatcttcggtgaatgggcgctgcgtggtaagcctagtctgctgggggcgtgttctggcgcgattgccggtctggtcggcgtgacgccagcctgcggctacattggggttggcggcgcgttgattatcggcgtggtagctggtctggcgggcttgtggggcgttaccatgctcaaacgcttgctgcgggtggatgatccctgcgatgtcttcggtgtgcacggcgtttgtggcattgtcggctgtatcatgaccgggatttttgccgccagcagcctgggcggcgtgggcttcgctgaaggtgtgacgatgggccatcagttgctggtacagctggaaagcatcgccattacgatcgtctggtccggtgttgtggcatttatcggctacaaattggcggatctgacggttggtctgcgtgtaccggaagagcaggagcgagaagggctggatgtcaacagccacggcgagaatgcctataacgcgtaacaagcactgcaaaaaacagccggacggttttcacctccggctatttttttaattgtgattacgcatcaccccttcctgaacggtgctggcaaccagtacgccgtcttgggtataaaactcaccgcgcacaaagccacgtgcgctggacgcgctggtgctctccacgctatacagcagccattcattcaaattaaacgggcgatggaaccacatggaatggtcaatggtggcaatctgaatccccggttcgagaaaaccgatgccgtgcggctgtagagctaccggcaggaagttaagatcagaagcgtaaccgagcagatactgatgaacgcgcaggtcatccggcacgctaccatttgcgcggatccacacctgacgatgtggttctgcgacgtgacctttcagtgggttatgaaactccaccggacggacttccagcggacgatcgcagatgaatttatctttcagcactggcggcagcaggtgcgccaggctttgggcgatttgcgtttcgctagggaggccatcaggcgctggcgcggacggcattgttttttgatgttcgaaacccgcttctggtgcctggaaagaggcagtcatataaaaaatcggtttgccgttttgaatagcagcaacccggcgggcgctgaagctgttaccgtcacgcagcgtttcgacatcataaataatcggcttcttactatcgccagggcgaagaaagtagctgtgaaagctatgtaccagccgctcttcagggacggtctcttttgcagcatacaaggcctgacccacgacctggccgccaaacacctggcgtaaacctaaatcttcactctggccgcgaaagagtccttcctcaattttttccagatttaacaatgtcagtaaattttttagcgcctgactcatataactctccagtaacaaagctgccgcagcaagccaaagtgagttgagtataacgcaaatttgctactggtccgatgggtgcaatggtctgaattacgggctaattacaggcagaaatgcgtgatgtgtgccacacttgttgacgttactattttgttaaccactcttccggcgaggaaagttagcccgctggtgcattgataataaggagaaatgaatgaaactcgtgcacatggccagtggtttagcggttgcgattgcgttggcggcttgcgcagataaaagcgcggatattcagacgccagcaccggctgcaaatacgtctattagtgcaacacaacaaccagctatccagcaaccgaatgtctccggtaccgtctggatccgtcagaaagtcgcactgccgcctgatgctgtgctgaccgtgacactttctgacgcgagcttagccgatgcaccgagtaaagtgctggcgcagaaagcggtgcgtactgaaggtaaacagagtccattcagctttgttctgagttttaacccggcagatgttcagccgaacgcgcgtattctgttgagtgcggcgattaccgtgaatgacaaactggtatttatcaccgataccgttcagccggtgatcaaccagggcggaactaaagccgacctgacattggtgccggtacagcaaaccgccgtgccggttcaggccagcggtggcgcaacgactaccgtacctagcactagtccaactcaggtgaatccgtctagcgcagttccagctcctacgcaatattaagcgacgttaaccctctccgcccggagagggttagtagttccagcgataacgctgcaagtcgatttgcccgcttccgcttaccatcacaccttctgccagtaatgcctgtcgctgacgctgtaaatccggtccggttaggctaattgtgccgtggcgattaaccacccggtgccagggtaaggtgctgccttcagggagacgctttaacacaccgcccacctggcgcgcggcgcgggggcttcccgccagtttcgccacatcaccgtaagtggtgacatagccttcgggaatagcggcgacgatttgccagacgcgttggggaaaactatcttctttttccatcttttcttcctgaggtaatttttcagcataatctggaaaaacgccgctgtgaagtcgcattgcgcaagaaaccagcatctggcacgcgatgggttgcaattagccggggcagcagtgataatgcgcctgcgcgttggttctcaacgctctcaatgggggctctgttggttctcccgcaacgctactctgtttaccaggtcaggtccggaaggaagcagccaaggcagatgacgcgtgtgccgggatgtagctggcagggcccccacccatttctgcctcccaccgtttcgtcaaaaaatcccaacatggctaaactttaaccacaactgacgtcgcaagaattgtctggctgcgcagtacgcttcggaggtatgtctgatgaagtatgttgatggttttgtggttgccgttcctgccgataaaaaggatgcctatcgggaaatggccgctaaggctgcgccattgtttaaagagtttggcgcgcttcgtattgtcgaatgctgggccagcgatgtaccggatggcaaagtgaccgattttcgtatggcggtgaaagcggaagagaatgaagaggttgtctttagctggattgaataccctagtaaagaggtccgcgacgctgctaatcaaaagatgatgagcgacccacggatgaaagagttcggcgagtccatgccgtttgacggcaagcgaatgatctatggcggattcgagagtatcatcgacgaataagtagcgtgacgggctgtgcggcgtgccgtcagcccaaaaattcacaaatgttgctcggcccagcgtaagaaatcttctttcggtaatgccttgctgtagagccagccctgaccgtagtgcacgccatgctggcgtaaccactcttcttgtttactggtttcgattccctccgctaccattttcagtttcagtgtttttgccatttcgatgatatgcggcgtgacatttttatattccagcgcatcaacgaaagatttatcgatcttcagaatgtcgacatccagatcctgtaaataacttaaactactataccccgtaccaaaatcatcaagataaatttcatggcccgcctcccggtagcgagaaattatcggggcgctggttttcggatcggcaaactcgcgttcagtgagttcaagcgcgatctgtctgggattaacctgatagtgattgatcatgtcacgcagcaattgcgggattttttcgctggtgagcacgggggattcaagattgatgctaatatgctgctgtggatgctgacgcagccagtcgcccatatcttcaaagacgcttcttataatcagtagcgtcaatggctcagaaaggcccgtttgctgtgccagcggaataaaactatctggactcaaccaactaccgtctgtctgcggccagcgcgccagtgcctcagcaccgacaattttgccattggctaaggagacaatcggctgatagtgcacgcaaatatcacgattttcgatagcatcctgcagccgatgatgcggactctgaatacggcgcaaaatacgcagcacaaacatcgctgccagcaggccaatcaccaacccgagcggtaaccaaataaagacttgccgatgccagcctttctgcaacattttcgtactagcccatgtgatgatgctaatattcatctccggtaagggcaggatatcgtaaatgattccattattttcgatatgctcaccgggtgttttttgtagcctggtaataattccctgagcaatttcatcgctgctggttatgacaacgttatgggcattgccaataatggcggcatcaatttgccaactgctatagggaatgacatcaataaaggaagcggggtcgatcatgacgacataatgtgccgttcccatggcgaccatgtaacggataatgcctaaatcgttatggcttgttaaccagacacgataaccatctttgctaattttacctggctcggggaaggtatcgggcggactttcatgctccagagagctacactggggaacgttgttatcgatataagccacttcctgaatatagcgataactgtaagatacccgacgcatttccatgagatgggcttcgctacaggcagcgccttgccatctttccagctcctgcagcgcatctttcccttgtgtcgccaccttattggctcgaatagcgacgcgggaggaataggtatccagctcttcaataaagcttgtttctacctgctgatgggccagccagatgcttaagccgacaggcagcaatacactaagaatcagtactccgctaataaggccgaccagatgtcgtgttctcaccagcatatccttattaacacagtgtagggaaagtatatctgattgtggaaaaaggctggctggagataaggaggtagagctggtatttcatgaagtgatgggtggaaacgatcattgtcatttgaccaggcgcagagctttacgcctggtatgtaaccctaacttaagatgtactttcggcgcgagcgagggtaaaaatatcgtaaaaagacagttcacctttacggacgatcattttttgcagttgttccttatgaacatccgcgacacgcggagagttcaagatggcttcaaccagcgcggcaggtacaaagcgcgtgttgtaccattcgccgttatagcaaacgcggaaatccagcacgtcgatatcttcatagcggtagcgtgggtagacatcgaaaaagaagaaaccattaagcaggataaataatacaaccagtagccagacagagccactcagcgtttcggactgcaacatcaccgccagggtggcaaaaaaagcaacgtacataccgataaacagccccggatgtttacggataaaactgatactaaagcggggtttgttgtcgcgtttttcgcgggtattcagagactcaatcgtttcggtcagcaggcgttgtatttcggtcatcgtttgccttcgtggtatctgcaactttccagggaacaccctattttaacgtgggaatagtagaggggaagtaacagatctaccacaattttgcataacagttgcgaaaaaccgattacaattttttaattattctggctggattaccgcccacgacaacgttgtccgggacatcttttgtgacaactgcaccactggctaccacgacgttatcaccaatggtcacaccagggttaatgaccgcgcgtccgccaatccagacgttattaccgatggtgacgggtttccccagttcagcaccgctattacgtgctacagggtcgatgggatgtgttgccgtgtagatatgaacgcctggtgccaacatacagttatcaccgatgcgaatagggcagacatcaagcatcacgcaatcgaagttggcgaaaaaattattaccgagaaaaatgttatagccatagtcacagcgaaacgttggctcaatataagcctctgtcacctgaccgaatagatcagcgagaatttgctggcgtaatgtgtgctcttccgccagggaatgattgtatcggtgaataagctgacgagcgcgcaggcgatcgcgagataacgtctcatctgcgctgcgatacaactcaccagcaatcatcttttctttttctgtgctcattactgacctccggttgctgaaaatgcggcaacacagtaagacgaaaagtcagtgaagagaacgttcccattacatctgtgtgataaagatcacatagggtatgtcttcatggcgaaaaagtataaaattcttaataaacagccggttatagctccgaaagcgaattatttattagcgaataaatttccatacactggaagggatcttgtcgtacagtttattcatggtcaattcggcgaggcggtgatctgcggcactgtaaaataccgccagttcattatcacttaattcgtatttatttttctcgataacacgctccagcgtgtcaattgtctggcaacgacgtaaacgcattaaataatcggttttcgttaaaggtttttcggacatacttctacctatggttgtaataattttaacaagataaactcgcaggattctctttcgtcgcattgacaaaacaacggaatagtcgattaccactcttccgccatttctgaagatcctgcatattaataccataactactgaacaacataaaggtgtcatccagatattcgtcgatctgctcaatgagcttattgtcttcattatacttaattttgtaattaagtgcgaaggtcgcaatatgctcaatcagttcattcaactggaggttgatcgcgctggttgggtcgtttacccagccatgattgctttcttcaaggtttgcaaggcagtcatgatacagggtttcacagagaaacttaagctgtgcgatatcatgtcttttgggactgtattcatccataacgcgtccccttcttagcggttgaactaacggacacctttcgggatggaaaaaacttactgacctggacttgccctctcgtttgttagcttaactataagccactctttgcaggttttcatcgcattattacgaaaaattacaattaggaaggaagcgggacaggactcactttttcatactagcactaacccgcagcaggtaaaagcagtttgctcgaactattcataacatttcaggattatcgccagatgaaattggtgacactaataccaggattgctctgaatatgacgtaataaccgaggaatgaataaagaattaccgcaaataattaagaatagcctctaaatgattatggattattaaatctattagcgctacttaatataaattaactaacaatcagtattttttatgaattttatccgtggttaatactggttttcgtatgagatcctgagttggtggttcaattactccttaatgttcgtaggttatgcataaaaaaggccgcttacgcggccttagtgattacacgttgtatcaatgatgatcgacagtatggctgtgctcgatatcttcattcttgcggctaaagcggcggcgaaccaccacaaagaataccggaacgaagaagattgccagtaccgttgcggtcaccatcccgcccattacaccggtacctactgcgttctgcgcgccggaaccagcaccagtactgataaccagcggcataacgccgaggataaacgccaggctggtcatcaggatcggacgtaaacgcatccgcaccgcatcaagcgtcgcttcaatcagacctttaccttctttatccatcaagtctttggcgaattcgacgataaggatcgcgttcttcgcgctcaacccaatggttgtgagcaggcctacctggaagtaaacgtcattggtcaggccacggaaggtggcagccagcaacgcaccgataacccccagcggaacgaccagcataacggagaacggaatgctccagctctcgtacagcgccgccagacacaggaacacgacaatcaagctaatcgcgtacagactaggtgcctggttgccggagagacgttcctgataggacatccccgtccagtcatagccaacaccggtaggcagtttgctcgccagttgttccatcagctccattgcttcaccggtacttttacccggtgccgcctggcctaagatttccatggatggcaggccgttgtaacgttccagacgcgggctaccgtactcccaacgagaagaggagaacgcgctgaatggcaccatctgaccatcagcagcacgaacataccagtcgccgatatcatccggcagcatacggtatttcgcttcactcatgacataaactttcttcacacgaccgcggtcgataaagtcgttcacatagctgccgccccatgcagcgcccagagtggtgttaatgtcgttgatagaaacacccagcgcctgcgctttttcctggtcgatatcaatcttaaactgcggggtatcttccagaccgtttggacgtacgctggtcaacatatcagggtgcttcgctgcttctgcaagcaactggttacgcgcctgagtcagtttttcgtgaccaaggccagcctggtcaatcagctcaaagtcaaagccggttgcagtacccagttccacgattgcgggcaggttaaaggcgaaaaccatcgcatctttgatttggctgaaagcgcgtgttgcacgcatggtaatcgcttcaactttgttttcttcgcccggacgatcggcccagtccttcaaggaaacgaacgcaataccggtattctgaccacgtcccgcaaagccgaagccgttaacggcgaacacgctctcaacgttgttcttttctttggtcagatagtaatgcgttacctcattgagcactttctgtgtacgttcctgcgttgcacctgctggcagctgaaccatggtcataaacacgccctggtcctcatctggcaagaaggagcttggcagacgcacgaacagataggccatgccgaccacgatgatcagatacagcaccaggtaacgccccgtactgcgcagaataccgcctacgctgtcggtgtagtggtgcgtgctcttctcgaacatgcggttaaaccagccgaagaagccttttttaccttccccgtgatcgcctttggcaatcggtttcagcatggtggcacaaagagctggagtcaggatcaacgccaccagtacgctcagcgccattgcactaacaatggtaatagagaactgacgatagatagcaccagtagaaccgccaaagaaggccatcggtacgaataccgcgctcagtaccatcgcgataccgaccagagcgccctgaatctgccccatgctcttacgggtagcttcttttggcggcaaaccttcttccgccataacacgctcaacgttttctaccacaacgatggcgtcatccaccaacaggccgatggcgagcaccatcccgaacattgttagcgtgtttatgctgaagccaaaggcggcaaggacggcaaaggtcccgagcaataccaccggtacggcaatggtcggaatcaacgtcgcgcggaagttctgcaggaacagatacataaccaggaacacgaggatgatcgcttcgaccagcgttttaaccacttcgtgaatagagattttcacgaacggcgtggtgtcgtatgggtaaacaattttcagaccgctcgggaagaacggttccatcttcgccagttcagcacggattgccgcagcggtatccagcgcgtttgcaccggtcgccagcttgatccccagaccggaagccggttggccgttaaactctgcgatgatgtcgtagttctcaccacccagctcaatcttcgcgacgtcacgcagcagcacgcgggaaccatcctgattcactttcagcaggattttgccgaactcttcagtagaggtcagacgcgtctgagcaataatagaggcgttaagctgttggcctttcaccggcggcgtaccaccgagctgacccgccgcaacctgggcgttctgcgctttgatggcggtaatgacatcaaccggcgttagctggaatttgttcagctcattcgggttcatccagatacgcatcgcgtactgactaccgaacaactgaacatcacccacgccgctcgtacggctgatggcatctttcatattcgccgccacgtagtcggagatatcctcctgcgtcatggtgccatcggtgttgataacgccgacaaccatcaggaagctgctggaacttttctcaacgctcaccccttgctgctgaacttcttgcggcagcaacggcatcgccagctgcagtttgttctgcacctgaacctgcgcgatatccgcatcagtaccagactcaaaggtcagggtgatctgcacggtacccgtggagtcactgttagaggacatgtacatcaggttatcgataccgttcatattctgttcgataacctgtgtcaccgtgtcctgcactgttttcgcatcagcgccggggtaggaggcggagatcgttactgccggcggtgcaatcgtaggatattgcgccaccggcagtttgaggatcgccagcccccctgccaacatgatgataatggcgatcacccacgcaaaaatcgggcgatcgataaagaaattaggcatgtcttaacggctcctgtttaagttaagacttggactgttcaggctgagcaccgcttgcggcttgctggttattatcagcggtaacttcttgtgcttttacctggacaccaggacgcactttctgcagcccacttattactacgcgatcgcctgctttcagaccttctgtcaccagccacttatcgccaatagcctggcttgcaacgatcggacgggtttccactttgtcatccgcgccaactaccagtacggtggcatcgccacgcggcgtacgggttacgccctgttgcgggactaaaatagcgtttggattaagcccttcttccagacgtgcgcgcacgaacatacccggcagcagagtgtgatccgggttcgggaagatagcgcgtagggtgatagacccagtggtctgatcaacggtaacgtcagagaattccagcgtaccgtcctgcgggaacttaatgccgtcactggtgatcagactcactttggctttgccgttctcttgtttcagcgtgccattcgccagttcctgtttcaggcgcaggaagtcgttgctggactgggtcacatcaacgtagatcggatcaagttgctgcacggttgccagcgcagtcgcctgaccgttctgtaccaatgcgccttccgtcacgttgctcttaccaatgcgaccgctaatcggagaggtgactttggtgtaagccagattgatccgcgcagtttcaacggcagctttcgccgcagttaccgcagcattcgcctgttgcgcatcagccagagcctgatcgtactcttgcttactgatgtactgagtaccgagcagtttctgataacgattcaccgtcaattgcgcgatattggctgcagcctgggctttcgccagatcacctttcgcactgtcgtatgtcgcctgataggtcgcaggatcaatctgatagagagagacacctgcttcgatgtcgctaccttctttgaaattacgcttcaggataatcccgctaacttgaggacgaacttctgcgatccggtaggcactggtgcgacccggaagctcggttgtgatctgcagaggttcagttttgactgttactacgccaacggcgggcatctgctggccaccttgttgggcctgtttgtcgtcacatcctgttagggctaagctgccactgagcatcagaacgaccgccagaggcgtaaaccctctgtttttgttcatatgtaaacctcgagtgtccgatttcaaattggtcaatggtcaaaagttaataaacccattgctgcgtttatattatcgtcgtgctatggtacatacattcacaaatgtatgtaaatctaacgcctgtaaattcacgaacatatggcacgaaaaaccaaacaagaagcgcaagaaacgcgccaacacatcctcgatgtggctctacgtcttttcagtcagcagggggtaagttccaccagcctgggcgagattgcaaaagcagctggcgttacgcgcggtgcaatctactggcattttaaagacaagagcgatttgttcagtgagatctgggaactgagtgaatccaatattggtgaactagagcttgagtatcaggcaaaattccctggcgatccactcagtgtattaagagagatattaattcatgttcttgaatccacggtgacagaagaacggcgtcgattattgatggagattatattccacaaatgcgaatttgtcggagaaatggctgttgtgcaacaggcacaacgtaatctctgtctggaaagttatgaccgtatagaacaaacgttaaaacattgtattgaagcgaaaatgttgcctgcggatttaatgacgcgtcgcgcagcaattattatgcgcggctatatttccggcctgatggaaaactggctctttgccccgcaatcttttgatcttaaaaaagaagcccgcgattacgttgccatcttactggagatgtatctcctgtgccccacgcttcgtaatcctgccactaacgaataaccctgaatctgactccaggatttttcctggacattttcgtcgttgctattctggttcactgcgtcgtgatattcttgcggtttgactttttcaggtcgttcttcaggttcagaaaccttcattcatcatgactatgttccagtattacaaacgaagtcggcattttgtttttagtgcatttattgcttttgtttttgtcttgttatgccagaacacggcgtttgcgcgggcgagtagcaatggtgatctgccgacaaaagcggacctgcaggcgcaacttgacagtctaaataaacaaaaagatctttctgctcaggacaaactggtgcagcaggatctgacagatacattagccaccctcgataaaatcgatcgcataaaagaagagacagttcagctacggcaaaaagtcgctgaagcgccggaaaaaatgcgccaggcgaccgcggcgttaacagcacttagcgatgtcgataacgacgaagaaacgcgcaaaattctgagcacgctgagcttgcgccagctggaaactcgcgttgcccaggcgctggacgatttgcaaaacgcacaaaacgatctggcgtcttataacagccagctggttagcttacagacgcagcccgaacgcgtgcaaaatgcgatgtataacgctagccagcagctgcaacaaattcgcagtcgtctggatgggactgatgtcggcgagacagccttacgtcccagccagaaagtgttaatgcaggcccagcaggcgttgctgaatgcggagattgaccagcagcgtaaaagcctggaagggaacaccgtcttgcaggataccttgcaaaagcaacgtgattacgtgacggcgaacagcgctcgtctggagcaccagttacaactgttgcaagaagcggtaaacagcaagcgcctgactttaaccgaaaaaacggcgcaggaagccgtctccccggatgaagccgcgcgtattcaggctaatccgctggtgaagcaggaactggaaattaaccagcagttaagtcagcgtctgattaccgcgactgaaaacggtaatcagttgatgcagcaaaacattaaagtcaaaaactggctggagcgggcgctgcaaagcgaacgcaatattaaagagcagattgccgtcctgaagggcagcctgctgttgtctcgtatcctttaccagcaacaacaaacgctgcccagcgcggatgaactggaaaacatgaccaaccgcatcgcggatttgcgtctcgaacagtttgaagttaaccagcagcgtgatgcactcttccagagcgatgcgttcgtcaacaaactggaagaaggtcacaccaacgaagtcaacagcgaagttcacgatgcgttattgcaagtggttgatatgcgtcgcgaattgctggatcaactcaacaaacagttgggtaaccagctgatgatggccattaacctgcaaatcaaccagcagcagttaatgagtgtgagcaaaaacctgaaatccatcctgactcagcaaatcttttgggtgaacagtaaccgtccaatggactgggactggatcaaagcgttcccgcaaagcctgaaagatgaatttaagagcatgaaaatcacggtgaactggcaaaaagcctggcccgccgtttttatcgctttcctcgctggtttgccgctgctgttgattgccgggctgatccactggcgtctgggctggctgaaagcgtatcaacaaaaactggcttccgctgtgggttccctgcgtaacgacagccagctcaacacaccaaaagcgatccttatcgacctgatccgtgcgctgccggtgtgcctgattattctcgcggttggcctgattctgttgaccatgcagctcaacatcagcgaactgctatggagcttcagcaaaaaactggcgatattctggctggtgtttggcctgtgctggaaggtactggagaaaaacggcgttgccgtacgtcacttcggcatgccggaacagcagaccagccactggcgtcggcaaattgtccgcatcagtctcgcattgctgcctatccatttctggtctgtggtggcagaactttccccgctgcatctgatggatgatgtgctggggcaagcgatgattttcttcaacctgctgctgattgccttcctggtatggccgatgtgccgcgaaagctggcgtgataaagagagccacaccatgcgactggtcaccattaccgtgctgagcataatcccgattgcgctgatggtgctgactgctacaggctacttctacactacgctgcgtctggcaggacgctggattgaaaccgtttatctggtgatcatctggaacctgctgtaccagacggtactgcgtggcttaagcgtagcggcgcggcgtatcgcctggcgtcgtgcgctggcgcgtcggcagaatctggtgaaagagggcgcagaaggtgctgaaccgccggaagaacccaccattgcactggagcaagttaaccagcagacgctgcgtattaccatgttgctgatgtttgcgctgttcggtgtcatgttctgggcaatttggtccgatttgatcaccgtgttcagctatctcgacagcatcacgctctggcattacaacggcactgaagctggcgctgcggtggtgaaaaacgtcaccatgggcagtctgttgtttgcgattatcgccagtatggtggcctgggcgttgattcgcaacctgcctggtttactggaagtgctggtgctcagccgactgaatatgcgccagggcgcgagctatgccattactaccatccttaactacatcattattgctgttggtgcgatgacggtgttcggaagcctgggcgtctcttgggataaactccagtggctggccgcagcattatccgtaggtcttggttttggtttacaagaaattttcggtaacttcgtctccggtttgatcattctattcgaacgtccggtgcgtattggcgatacggtaaccattggtagcttcagcgggacggtaagtaagatccgtattcgtgcgacaacgattaccgatttcgatcgcaaagaagtgatcatcccgaacaaagcgtttgttaccgagcgtctgatcaactggagcttgactgacactactacgcgtctggtgatccgtctcggcgtggcctatggctccgatctggaaaaagtgcgtaaagtgttactgaaggcggcgactgagcacccaagggtgatgcacgaaccaatgccggaagtcttctttacggcatttggtgccagcacgttggatcatgagctgcgtctgtatgtgcgtgaactgcgtgaccgtagtcgtactgtcgatgagctgaaccgtactatcgatcagctgtgccgtgaaaacgacatcaacattgcctttaaccagcttgaagtgcatctgcacaacgagaagggcgatgaggtgacggaagtaaaacgcgactacaaaggcgatgacccgacgccagcggtagggtaaaaacgaaagggggcaacatttagttgccccgagattgctaacaaagtgcgcgttgttcatgccggatgcggcgtgaccgccttatccggcctacgaaaccgcaagaattcaatatattgcaggagcggtgtaggcctgataagcgtagcgcatcaggcagttttgcgtttgcccgcaaccttaggggacatttagcgaccccatttatttctcacttttccgcctcatcatcgcgcgttaatttcttttcataatcacgctttacaatatccagcgcgcgcagcacggtactggcagggatctgattttcctccagcagcacaatcaaatcgacagccagtttgacatcgtcaggggcattttccagactcatattctctccattgttagcgggttaaacgcgctaacctgttttcgattttttccagcgcatggcggcagcgtgccaggcgcgcttcataggcttccacttcacgatgcagcgtttgctgttccacgagatcggtcacccgcgccagacgggctctgcgttcggcaaccatctcacgtagccgccgctcaaaatcctgatgctgaatacgtttacgctgccagcgggcaattttcggtggtgcactgtcccactcgcgcaaactccaggcggaggcttcacgcgcgatggcttccagttgtgccgccagatgttccgccagccaggccacttgcggcagctgttgctgctcaactgcatgacgaagcgcagccagattatcgcccgcctcgtcgagacaagcctgtagtgttgtcgcacgagtctgaaaaagatgcctgtcgaaacgagcacttagcgtggcgaactgactcaccggggcacaacgctgacgcagcgtagcgagctgtccttccagtttttccagcagcagggcggttttcacgataagacctcaatgaaaatgataattgttatgctaaagtagccactctgtaagctgacaacactcaatatgcaacgaatcattttaatcatcattggctggctggcggtagtgctgggtacgctgggcgtggtattaccggtattaccgacgacgccgtttatcctgctggcggcctggtgctttgcccgttcttccccgcgctttcacgcctggttgctgtaccgcagttggtttggcagctatctacgtttctggcagaaacatcatgcgatgccgcgcggcgtcaaaccgcgggcgattttgcttattttgctcacgtttgccatttctctgtggttcgtccagatgccatgggtgcgcatcatgttgctggtaattctcgcctgtttgcttttctatatgtggcgaattccggtgattgatgaaaagcaagaaaagcactgaagcacaacaatcgcagttgcaattattgcgtacagccagtacattctggcgttttcgagcacaggcgcaggcggtcaaaggttaaacaactgttacttttgatacgtttaaaacgcgccgtgagtaccaccgtaacaagcaggcatacacttatgaccgcgactgcacagcagcttgagtatctcaaaaatagcatcaaaagcattcaggactacccaaaacccggcattcttttccgcgatgtcaccagcttactggaagacccgaaagcttacgctctcagcatcgacttgctggttgagcgttacaaaaatgcgggcattaccaaagttgtcggcaccgaagcgcgtggcttcttgtttggcgctccggtagctctgggtctgggcgttggctttgtaccggtccgtaaaccgggcaaactgccgcgtgaaaccatcagtgaaacttacgacctggaatacggcaccgatcagctggagatccacgttgatgccatcaaaccgggcgacaaagttctggtggtggacgacctgctggcaaccggcggcactatcgaagcgaccgttaaactgatccgtcgtctgggtggtgaagtggctgacgctgcgttcattatcaacctgttcgatctcggcggcgaacagcgtctcgaaaaacagggcattaccagctacagccttgtcccgttcccgggccattaattatcgccagtcttgtgctgcccacgctacggacagcacaagatgtgcattcagcctcgccgttctgacggggctgtgttagcattaccccttcgtgaatccaccttccagcgtttcagagcctgccaatgagttatcaggtcttagcccgaaaatggcgcccacaaacctttgctgacgtcgtcggccaggaacatgtgctgaccgcactggcgaacggcttgagcttagggcgtattcatcatgcttatcttttttccggcacccgtggcgtcggaaaaacctctatcgcccgactgctggcgaaggggctaaactgcgaaaccggcattaccgcgacgccgtgcggcgtgtgcgataactgtcgtgaaatcgagcaggggcgctttgtcgatctgattgaaatcgacgccgccagccgcaccaaagttgaagatacccgcgacctgctggataacgtccagtacgctccggcgcgtggtcgtttcaaagtttatctgatcgacgaagtgcatatgctgagccgccacagctttaacgcactgttaaaaacccttgaagagccgccggagcacgttaagtttctgctggcgacgaccgatccacagaaattgccggtgacgattttgagtcgctgtctgcaatttcatctcaaggcgctggatgtcgagcaaattcgccatcagcttgagcacatcctcaacgaagaacatatcgctcacgagccgcgggcgctgcaattgctggcacgcgccgctgaaggcagcctgcgagatgccttaagtctgaccgaccaggcgattgccagcggtgacggccaggttagtacccaggcggtcagtgcgatgctgggtacgcttgacgacgatcaggcgctgagcctggttgaagcgatggtcgaggccaacggcgagcgcgtaatggcgctgattaatgaagccgctgcccgtggtatcgagtgggaagcgttgctggtggaaatgctcggcctgttgcatcgtattgcgatggtacaacttagccctgctgcacttggcaacgacatggccgccatcgagctgcggatgcgtgaactggcgcgcaccataccgccgacggatattcagctttactatcagacgctgttgattggtcgcaaagaattaccgtatgcgccggaccgtcgcatgggcgttgagatgacgctgctgcgcgcgctggcattccatccgcgtatgccgctgcctgagccagaagtgccacgacagtcctttgcacccgtcgcgccaacggcagtaatgacgccaacccaggtgccgccgcaaccgcaaagtgcgccgcagcaggcaccgactgtaccgctcccggaaaccaccagccaggtgctggcggcgcgccagcagttgcagcgcgtgcagggagcaaccaaagcaaaaaagagtgaaccggcagccgctacccgcgcgcggccggtgaataacgctgcgctggaaagactggctagcgtcaccgatcgcgttcaggcgcgtccggtgccaagcgcgctggaaaaagcgccagccaaaaaagaagcgtatcgctggaaggcgaccactccggtgatgcagcaaaaagaagtggtcgccacgccgaaggcgctgaaaaaagcgctggaacatgaaaaaacgccggaactggcggcgaagctagcggcagaagccattgagcgcgacccgtgggcggcacaggtgagccaacttagcctaccaaaactggtcgaacaggtggcgttaaatgcctggaaagaggagagcgacaacgcagtatgtctgcatttgcgctcctctcagcggcatttgaacaaccgcggtgcacagcaaaaactggctgaagcgttgagcatgttaaaaggtagtacggttgaactgactatcgttgaagatgataatcccgcggtgcgtacgccgctggagtggcgtcaggcgatatacgaagaaaaacttgcgcaggcgcgcgagtccattattgcggataataatattcagaccctgcgtcggttcttcgatgcggagctggatgaagaaagtatccgccccatttgatcgtaagcacagcttacgttcgtcatccttaacgtgattgagagagaaacctatgtttggtaaaggcggtctgggtaacctgatgaagcaagcccagcagatgcaagaaaaaatgcagaaaatgcaggaagagatcgcgcagctggaagtcaccggcgaatctggcgcaggtctggtaaaagtgaccatcaacggtgcacacaactgccgtcgcgtagagatcgacccgagcctgctggaagacgacaaagagatgctggaagacctggtggctgcagcattcaacgacgcagcacgtcgtattgaagaaacgcagaaagaaaaaatggcctctgtatcctccggaatgcagctgccgcctggctttaagatgccgttctgatgcaaaccagcccgctgttaacacagcttatggaagcactgcgctgtctgccgggcgttggcccgaagagcgcgcagcgtatggcgttcacgctgcttcagcgcgatcgtagcggcgggatgcgtctggcgcaggcgctcacccgggcgatgagcgaaatcggccactgcgccgattgccgcactttcaccgaacaggaagtctgtaacatctgtagcaatccgcgtcgtcaggaaaacggtcaaatctgcgtggtggagagtccggcggacatctacgccattgagcagacggggcagtttagtggtcgttattttgtgttgatggggcatctgagtccgctggacggcatcggtccggatgatatcgggcttgatcgtctggaacagcgtctggcagaggaaaaaatcactgaagtgatcctcgccaccaaccccacggttgaaggtgaagctaccgctaactacattgccgagctttgcgcgcaatatgacgtggaagccagccgaatcgctcatggcgttccggttggcggcgagctggaaatggtcgacggcaccacgttgagtcactcccttgccgggcgtcataagattcgtttttaagcaaacgagagcaggatcacctgctctcgcttgaaattattctcccttgtccccatctctcccacatcctgtttttaaccttaaaatggcattattgaggtagacctacatgaaaggacaagaaactcgtggttttcagagtgaagtgaaacagcttctgcacctgatgatccattctctctattccaataaagaaatcttcctgcgtgagcttatctctaacgcctccgatgcggcggacaagctgcgtttccgtgcgctctctaacccggacctgtacgaaggtgatggcgaactacgcgttcgtgtctctttcgataaagacaagcgtacgctgaccatctccgataacggcgtggggatgacccgcgacgaagtgattgaccatctggggactatcgctaaatccggtaccaaaagtttcctcgaatccctgggttctgaccaggcgaaagacagccagctgatcggtcagtttggtgttggtttctactctgcgtttatcgtggccgacaaagtgaccgtgcgtactcgcgcggcaggcgaaaaaccagaaaatggcgtcttctgggaaagcgctggcgaaggtgaatacaccgttgccgacatcaccaaagaagatcgtggtactgaaatcaccctgcatctgcgtgaaggcgaagacgagttcctcgatgactggcgcgtgcgttccatcatcagcaaatactccgaccatatcgcgctgccggtagagatcgaaaaacgcgaagagaaagacggcgaaaccgttatctcctgggagaaaatcaacaaagcgcaggcgctgtggactcgtaacaagagcgaaatcaccgatgaagagtacaaagagttctacaaacacatcgcccacgactttaatgatccgctgacctggagccacaaccgtgttgaaggtaagcaggagtacaccagcctgctgtacatcccgtcccaggctccgtgggatatgtggaaccgcgatcataaacacggcctgaaactgtatgttcagcgtgtgttcatcatggacgacgcagaacagttcatgccgaactatctgcgcttcgtgcgtggtctgattgactccagcgatctgccgctgaacgtttcccgtgaaatcctccaggacagcacggtaacgcgtaacctgcgcaatgcgctgaccaagcgtgtgctgcaaatgctggaaaaactggcgaaagacgacgcggaaaaataccagaccttctggcaacagtttggcctggtactgaaagaaggtccggcggaagatttcgctaaccaggaagcgatcgccaaactgctgcgttttgcttctacccataccgattcttctgcgcagaccgtatctctggaagactacgtttcccgcatgaaagaagggcaggagaaaatctactacatcaccgcagacagctatgcggcagcgaagagcagcccgcacctggaactgctgcgtaagaaaggcatcgaagttctgctgctttccgaccgcatcgatgagtggatgatgaactatctgactgagttcgacggtaaaccgttccagagcgtgtctaaagttgacgagagccttgaaaaactggctgacgaagttgatgagagcgcgaaagaagcggagaaagcactgactccgttcatcgaccgtgtgaaagccctgctcggcgagcgcgtgaaagatgtccgtctgactcaccgtctgaccgatacgccagcgatcgttagcaccgacgcggacgaaatgagcactcagatggcgaaactgttcgctgcggcgggccagaaagtgccagaagtgaaatacatcttcgaactgaacccggatcacgtactggtgaaacgtgcggcagatactgaagatgaagcgaagttcagcgagtgggtagaactgctgctggatcaggcgctgctggcagaacgcggcacgctggaagatccgaacctgtttattcgtcgtatgaaccagctgctggtttcctgatgtaatgccggatgaccttcgtgtcatccggcatttttcttttcatcatctgcactttccgcaaattatctcgccattaaccgtttcagccccaggtgcctttcttgaggcaatcgcctgttggtggtatcgtttatcgctttttcaaaaaattcgacacattttaaggggattttcgcaatgcgtatcattctgcttggcgctccgggcgcggggaaagggactcaggctcagttcatcatggagaaatatggtattccgcaaatctccactggcgatatgctgcgtgctgcggtcaaatctggctccgagctgggtaaacaagcaaaagacattatggatgctggcaaactggtcaccgacgaactggtgatcgcgctggttaaagagcgcattgctcaggaagactgccgtaatggtttcctgttggacggcttcccgcgtaccattccgcaggcagacgcgatgaaagaagcgggcatcaatgttgattacgttctggaattcgacgtaccggacgaactgatcgttgaccgtatcgtcggtcgccgcgttcatgcgccgtctggtcgtgtttatcacgttaaattcaatccgccgaaagtagaaggcaaagacgacgttaccggtgaagaactgactacccgtaaagatgatcaggaagagaccgtacgtaaacgtctggttgaataccatcagatgacagcaccgctgatcggctactactccaaagaagcagaagcgggtaataccaaatacgcgaaagttgacggcaccaagccggttgctgaagttcgcgctgatctggaaaaaatcctcggctaattcgaaagcgcgcacggacagtcccctcgccccctcggggagagggttagggtgaggggaacaggcccgcacaagcaaacttatcagcaatctcaggccggatattcattcggccttttacaaaaacctcaatctgcgctattcctttttctgatttgacctctcacagcaattagttcttcttcctcacttttccgctacaattatcaacaagttgaatcgataagaggcggtaatgcgtcagactaaaaccggtatcctgctggcaaacctgggtacgcccgatgcccccacacctgaagcggtaaaacgctatctgaaacaatttttaagcgacagacgcgtggttgataccagtcggttgttatggtggccattgctgcgcggcgtgattttgccgctgcgcagcccgcgtgtggcgaagctgtatgcctctgtctggatggaaggtggcagcccgctgatggtttacagccgccagcaacagcaggcgctggcacaacgtttaccggagatgcccgtagcgctgggaatgagctacggcagcccaagtctggaaagcgccgtagatgaactcctggcagagcatgtagatcatattgtggtgctgccgctttatccgcaattctcctgttctacggtcggtgcggtatgggatgaactggcacgcattctggcgcgcaaacgtagcattccggggataagctttatacgtgattacgccgataaccacgattacattaatgcactggcgaacagcgtacgcgcttcttttgccaaacatggcgaaccggatctgctactgctctcttatcatggcattccccagcgttatgcagatgaaggcgatgattacccgcaacgttgccgcacaacgactcgtgaactggcttccgcattggggatggcaccggaaaaagtgatgatgacctttcagagccgctttggtcgggaaccctggctgatgccttataccgacgaaacgctgaaaatgctcggagaaaaaggcgtaggtcatattcaggtgatgtgcccgggctttgctgcggattgtctggagacgctggaagagattgccgagcaaaaccgtgaggtcttcctcggtgccggcgggaaaaaatatgaatatattccggcgcttaatgccacgccggaacatatcgaaatgatggctaatcttgttgccgcgtatcgttaaagctgagcggtaaagaactgagcgccgtcgcgaagagcctcgtcggcggttttcatcatccgactataatgcaaaaaggcgtgcagcgtgcctgggtagagtttgaactcacagggctgctgatgcgccgctaacgtctggtaaagcagacggctgtcatccagcagcggatcgaactccgccccggcaataaaacagggcggaacttcgcgagtgagatcattattaaacagacagtaatacgggctctcgcggtccgcgtcgttgcttaaatatgcctcttcgtacatctgcaaatcctgttgcgttaagccatcccagacaccgcccaacagacgacgagtcacggaatcccgtaatccgtaaagcccataccacagcaaaacgcccgcaactttaccgcaatcgatctgtttatcacgcaaccacaacgcactggcgagcgccagcatggcacctgcggaatcaccggcaaagccaatgcgggacatattgatttgataatcctccgcctgctggtggaaataacaacaagcagccacaatttcctctatcgcttgcggaaaacgcgcttcaggactaagggtgtaatcaataccaatcaccgtacattggctgtagcttgccagcaggcgcatgatgcgatcgtgggtatcgagattgccgagaataaaaccgcctccatgcaaataaaatagcgtcgctgggctatctggctgcggacaaaagagacgtgtttccacctgcccatattttgttggaaccatgtaagctctggttgccatttctggagcgcccgcattccagaatcggcgctcaagcgtgtaatactgtcgttgctcagcaatcgttcccgttgcgggccagggcggtaaatccggctgaagagtattcacaacggtcttcatttcagcagaaataaggtccagaacaggtagtttgttttccggcttcatacaaaaactcctttcaaattacgtcattgtaaggaaccactgccatgaaaatgcgatcccgcctgctgatattgaaactggctgcgtctcgcgcgctcccgtcagattgtgttaacattcgccgctcagttaaccacccgtaaaaacaaccatgaaatttcccggtaaacgtaaatccaaacattacttccccgtaaacgcacgcgatccgctgcttcagcaattccagccagaaaacgaaaccagcgctgcctgggtagtgggtatcgatcaaacgctggtcgatattgaagcgaaagtggatgatgaatttattgagcgttatggattaagcgccgggcatagtctggtgattgaggatgatgtagccgaagcgctttatcaggaactaaaacagaaaaacctgattacccatcagtttgcgggtggcaccattggtaacaccatgcacaactacagcgtgctcgcggacgaccgtagcgtgctgctgggcgtcatgtgcagcaatattgaaattggcagttatgcctatcgttacctgtgtaacacttccagccgtaccgatcttaactatctacaaggcgtggatggcccgattggtcgttgctttacgctgattggcgagtccggggaacgtacctttgctatcagtccaggccacatgaaccagctgcgggctgaaagcattccggaagatgtgattgccggagccagcgcactggttctcaccagttatctggtgcgttgcaagccgggtgaacccatgccggaagcaaccatgaaagccattgagtacgcgaagaaatataacgtaccggtggtgctgacgctgggcaccaagtttgtcattgccgagaatccgcagtggtggcagcaattcctcaaagatcacgtctctatccttgcgatgaacgaagatgaagccgaagcgttgaccggagaaagcgatccgttgttggcatctgacaaggcgctggactgggtagatctggtgctgtgcaccgccgggccaatcggcttgtatatggcgggctttaccgaagacgaagcgaaacgtaaaacccagcatccgctgctgccgggcgctatagcggaattcaaccagtatgagtttagccgcgccatgcgccacaaggattgccagaatccgctgcgtgtatatagccacattgcgccgtacatgggcgggccggaaaaaatcatgaacactaatggagcgggggatggcgcattggcagcgttgctgcatgacattaccgccaacagctaccatcgtagcaacgtaccaaactccagcaaacataaattcacctggttaacttatagtagcttagcgcaggtgtgtaaatatgctaaccgtgtgagctatcaggtactgaaccagcatagtcctcgtttaacgcgcggcttgccggagcgtgaagacagcctggaagagtcttactgggatcgttaagttatcgtcggttcgtaggccagataaggcgttcacgccgcatctggcatttggctctcgatgcctgatgcgacgctggcgcgtcttatcatgcctacatatttttcatattttacatccggcaaccaccgtttaccccgtcaccacctcacccgccggtggcgtttccagcagttccagcatggtacgggcgatttcacgctcgcccatcactacctgattcgcaccacgttcggtgatatacgccacttcatcgtcataatgggcgcgggcaataatctcaatatccggatttttcgcgcgggcagatgccacaatctcacccgcttcataaccgttgggaatcgtcaggatcagccattttgcacattccagatgcgccagttgcataatttcttcgttcgccgcattgcccaatactgcgcggaccccgcgctctcgcagctcatcaacacgggttcgactcgtctcaatcaccaccagcggaatatcagaggcgagcaatttctcccccagcaggctgcctacacgaccgtaacccaccagtagcgcatggttgcaaatatccactgggatctgcttctcttcttcgattgcctcttccagcgtctgctcttccagcgtttcggtcttcgccagatatttctccagtagtgcgaacagtaccgggttgagcataatgctcaggatcgcccctgccagtaccaggttttgtccggcctgcggcagtaaattcaatgccattcccagtcccgccaggataaacgcgaactcaccaatctgcgccaggctggcggcgatggttaatgccgtacgttgggagtgaccaaacagtcgcaccaggaaaaatgcggctaagctcttaccaaacagaataatcgccagcgtcgccagcactgccagcggttgctgaatcagaattaacggatcaaacaacatcccgacggagacaaaaaacagcaccgcaaacgcgtcgcgcaatggcagcgtatcgtgggcggcacggtgactcagttcagactcgttcagtaccatcccggcaaagaacgcaccgagtgcaaaggagacatcaaacagctctaccgcaccaaaggcaacccctaacgccagcgccagcacgctcagggtaaacagctcgcgagaaccggttgccgcgctgcgtgccataatccacggcaccagacggcgacctaccagcatcataatggcgataaatgcgatcactttgccgatggtgatccccatatcgactgcaagagtggcaaagcccacatcgccctgttccatcattcctgccactgcgggcagcaacaccagcgtcagaaccattaccaggtcttccacaatcaaccaaccgatggcgatttgcccacgctgactgtcaattaattgccgttcttcaagtgcgcgcagtaacaccacggtactggcggtggaaagacataaaccgaacacgataccggtcattaagctccagcccagcacggcagagagcgccatacccagcagcgtcgccacggctatctgggcgatcgcaccgggaatggcgatggcctttaccgccatcaaatccttcaggctaaagtgcaaaccgacgccaaacatcaacagaatgacgcccagttcagccagttccggggcaagcttggtatcggcaacaaagcccggagtgaatggtcctgccagcacacccgctaacagatatcccaccagaggagaaatacgtagtttattggccagcatgccgaggataaaggcgagcacaaggccgccaacaatggtggtgataagcggggtggcgtgatgcattccgtctccttttcctggtggttattgtccatttttggccgggaaaaccaaaattacaggtaatagtttatgacaatttcattgatgatgttcatgaataattattgaattttgcagaaaaatggaattagctgcaaaaaaagcacggatcggaaaacagaaggcggtttaacagaggaaaggcttatggcgactgtaaaacgatgcagccaaagtttgcctttggctgcaatgaaatcagtctttatgccggttatcaggcaggaatatggtcaacatccccaatagtggcaggaaagcacagattttatagactaactcgatgctggtgtgatcggcgataagccccagaactgccgctcccagacctcccatgccaaaagcaaaaccgaaaaagagtccagaaaccataccgatacgtcctggaagcagctcctgagcgtagaccagaatggcagagaatgcgctagcgaggataaatccaataatcaccgttaaaacccccgtccagtgcaggctggcgtagggtaaaatcagcgtaaacggcgcaacgccgaggatagagccccaaatcacatatttccgcccaattttatcccctacaggcccgccgatcaccgtacctgccgcaacggcaaacaggaaggcaaacagatgaagctgagcattctggatagataatccgaatttttgcatcagataaaaggtgtaatagctgctgatgctcgccatatagaaatatttgctgaaaatgaggattaacagaatgctgaccgccagtacaactttattgcgcggcagtggattgataatcgtcgctttgggttttcctttattcattcggtgctgtgcgctgtaccaacggctgatttgcgccaacaccacgatcgccagcagtgccgcaagcacaaaccaggcaacgttgcctttgccataaggcgcgataatcaccgccgccagcaagggtcccagggaactgccaaagttgccgccgacctgaaagatagattgcgccaggccatgccgcccgccggaagccatacgggccacgcgagaagattccggatgaaagacgctactaccggtaccgaccagcgccgccgccagcagaactgcgccaaaactgcccgccagcgcaagcagcaccagaccgcttaaggtaaagcacatgccaattggcaagctccatggcatcggatatttatcggtccagtagccgaccactggttgcagtaggctagaggcgagctggaaggtgagggttatcatgccaatctgcataaatgtcagagaaaattcactctgaagcagcggataaatcgccagaatcaggctttggatcatgtcgttcagcagatgactgaggctgatagcacctaaaataccaaagcttgttcgggccttggtcgtactcgcagccgcgcccgccacaggctggggttgttcactcattgccataggaaagtcactttttcagggttgcgatgtaaagaatgatcttatttgtgattattaccagactaacatacctgtatgcgtcgtctgaaggaagtctcaacgccgaatacagaatttctaatctggatgcagatttatcttcaccggacgcagacttgtctatgatgtcgcgtcatactatttttcaacacgttgaaatcaggtcagggagagaagtatgaaattattgcagcggggcgtggcgttagcgctgttaaccacatttacactggcgagtgaaactgctctggcgtatgagcaggataaaacctacaaaattacagttctgcataccaatgatcatcatgggcatttttggcgcaatgaatatggcgaatatggtctggcggcgcaaaaaacgctggtggatggtatccgcaaagaggttgcggctgaaggcggtagcgtgctgctactttccggtggcgacattaacactggcgtgcccgagtctgacttacaggatgccgaacctgattttcgcggtatgaatctggtgggctatgacgcgatggcgatcggtaatcatgaatttgataatccgctcaccgtattacgccagcaggaaaagtgggccaagttcccgttgctttccgcgaatatctaccagaaaagtactggcgagcgcctgtttaaaccgtgggcgctgtttaagcgtcaggatctgaaaattgccgttattgggctgacaaccgatgacacagcaaaaattggtaacccggaatacttcactgatatcgaatttcgtaagcccgccgatgaagcgaagctggtgattcaggagctgcaacagacagaaaagccagacattattatcgcggcgacccatatggggcattacgataatggtgagcacggctctaacgcaccgggcgatgtggagatggcacgcgcgctgcctgccggaagcctggcgatgatcgtcggtggtcacagccaagatccggtctgcatggcggcagaaaacaaaaaacaggtcgattacgtgccgggtacgccatgcaaaccagatcaacaaaacggcatctggattgtgcaggcgcatgagtggggcaaatacgtgggacgggctgattttgagtttcgtaatggcgaaatgaaaatggttaactaccagctgattccggtgaacctgaagaagaaagtgacctgggaagacgggaaaagcgagcgcgtgctttacactcctgaaatcgctgaaaaccagcaaatgatcagcctgttaagtccgttccagaacaaaggcaaagcgcagctggaagtgaaaataggcgaaaccaatggtcgtctggaaggcgatcgtgacaaagtgcgttttgtacagaccaatatggggcggttgattctggcagcccaaatggatcgcactggtgccgactttgcggtgatgagcggaggcggaattcgtgattctatcgaagcaggcgatatcagctataaaaacgtgctgaaagtgcagccattcggcaatgtggtggtgtatgccgacatgaccggtaaagaggtgattgattacctgaccgccgtcgcgcagatgaagccagatagtggtgcctacccgcaatttgccaacgttagctttgtggcgaaagacggcaaactgaacgaccttaaaatcaaaggcgaaccggtcgatccggcgaaaacttaccgtatggcgacattaaacttcaatgccaccggcggtgatggatatccgcgccttgataacaaaccgggctatgtgaataccggctttattgatgccgaagtgctgaaagcgtatatccagaaaagcagcccgctggatgtgagtgtttatgaaccgaaaggtgaggtgagctggcagtaatccgaaagtgccggatgtttgcatccggcacaatgcttaatcgcggcgggcgatatcagcaaatttggcatcgaggatctttgccagatcgcctgccgccagttcgatatccagtccgcgcttgccgccggaaacataaatagtggcaaattcttgtgcgggggcgtcgataatcgttggcagacgttttttctgccccagtgggctaatccccccaaccaggtatcccgtgctacgctgcgcgaccatcggatcggccatctcaactttcttggcacccagcgcttttgctacttttttaagatccagttgacctgcgaccggcgtaacggccacggcaaggtgtttcatatcaccgttcactgccaccagcagcgttttgtagacctgatccggattcaaacctaattttttgacgacttcatcgccaaaattggtttcagccggatcgtgctcgtaggtatggatttgaaagctaatcttgtttttttcgagtaatttaactgcgggtgtcatggtaattttcctgccttaaacaaaaaaacgaagcaagcatacgcctgatggcggtccaaaaaaaagagtcatcttgcctaagagtattggcaggatggtgagattgagcgacaatcgagttacaccgtcgcttaaagtgacggcataataataaaaaaatgaaattcctctttgacgggccaatagcgatattggccatttttttagcgcaacatttgcggcaaattcccttctccatacaggtgtagtgcaccgaccgcgaccacatatcgccccggcggcatggcgcgtaatttatcccgccaggcgagatttcgctgatgcatcagcacatcgtacaggctctgactgaacgtattgggcagcgttatatcattattttgcggcggtgcattcagccaccagctcatcatttgttgcagcaaccgtgcgttggtatgccagtgggtcagcgtatcgtccagcagcgccagtcctttgtcagggagctggagcaacatggcaatctggttttcagccccttccagttcaatcacgggtttatgttgttgcttcgccgcctgcaatagctggtaatcgataccgtattctgcccgcagccccagtttttgtgcctgcgtcgcctgaagaaccatcgcgatttgccacagcggttgggtagaaaagagactgggagaaatgcccatctcctggctaatgtgctgcaggttttggagttgctcctcgctaatgcgctcttccagcgcctcgcaggcaggcaaattagcaaaaggcgtatcgctggtggaaacatccgcctcgacgatcagcgcatcggcgtttttgagctttttgagcaaacgggtgggcaggggagccatatcgtggctacccatatgaatactgccaatcagatgaaaatggcgattgccggggagggtgatatcgatggcaggccaggtgtaatgattaccgcgcagcgcggcccaaagcgtttttacccggtacaacagatccatacgacctccctttgtgaaatatcatgctagcgcgcggtgagggatggcgcaaatggagttggagacttgtttaatgtgtttgtatgattcagtatgttcttgcatcgctattcacaaggaagcaacagttaaaaaccatgaaacaggcaacaagaaaaccgacgacacccggagatattcttctctatgaatatctggaaccgctcgatttgaaaatcaatgagttagcagagttgctgcatgttcatcgtaatagcgtcagtgcactgatcaataacaatcgtaaactcactactgagatggcatttcgtctggcgaaagtttttgataccacagtcgatttttggctaaacctccaggcggcggttgatctttgggaagttgaaaacaacatgcgcacccaggaagaattgggacggattgaaacagtggctgaatatttggcacgccgtgaagagcgtgcaaaaaaggtcgcgtaaggccaaaacatcgcttcatctcgtaggccggataaggcgttcacgccgcatccggcatccgagcaccattgcctgatgcgacgcttacccgtcttatcaggcctacaaacttgtgcctgaaccgtaggccggataaggcgtttacgccgcatccggcatccgagcaccattgcctgatgcgacgcttacgcgtcttatcaggcctacaaacctgtgcctgaaccgtaggccggataaggcgtttacgccgcatccggcagtcatgcgtcgatgccaaatgcgccaccctaaagcagcgcatccgcaatgatgtacttattccttcggtttaaaccgcagcaaccggttggcgttactcactacggtaatgctgctgagcgccattgccgctccggcaactaccgggttaagcagtgttccagtgaacggccacaaaataccggcggcgaccggaataccgatactgttgtagataaacgcaccgagcaggttctgcttcatgttgtgcagcgttgcgcgggaaatagcgagcgcatccgcaacgcccatcaggctatggcgcatcagggtaatcgccgcggtttcaatggcaacatcactgccgccacccatcgcaatgccgacatccgcctgagccagcgctggcgcgtcgttaatgccgtcgcccaccattgccacctaacgtccttcactttgcagatgtttgatcgcttcggctttaccgtccggcagcaccccggcgatcacctcatcaatccctgcttctttggcgatcgcattggcggtggttgggttatccccggtcaacatcaccagacgatatcccgctttatgcaggcgttgcagcgccgccacgctatcactacgcaacggatcgcgtactgccagcagggctaccgctttcccgtcaaccgccagcagcacaggcgttgccccttggcttgcctgagcagtaatctccgcttcgatagctttggtaccaacctgttgctcatttaacagcgcctgattgcccagcaataacgcatgaccttcagcttcaccgctcacgcccagcccgcgcaatgtgcggaaaccgttgacctgcggtagctgcatatcacctgctttatcgaggatcgctcgtgccagcggatggctggaaccttgctccagtgccgccgccagacgcaatgcctgcgcttcatcaacatcagcaaatgttttcactgcgacaacctgcggcttcccttcagtcagcgtcccggttttatcgaacactacagtgtcgagtgtactggcgcgttgcagcgcgtcagcgtcccgcaccagcacgccaaactcagccgcccgcccgacgccggaaataatgctcatcggcgtcgccagccccagcgcacacggacaggcaataatcagtaccgtggtggcaatcaccagggtatagacaatctgcggtgccggaccaaagaaataccagattgccgcactgacaagcgcaataaccaccactaccggcacaaatacggcactgattttatccgccagctgaccgatttctggcttgctgctctgggcctggcgcaccatgcgaatgattcgactcagcgtagtatggctgccaaccgcactggcacgaaacagcacactgccgtcctgtaccactgtcccggcatggacgctatcgccttcgcctttttgctgcgggattggttcgcccgtcagcatcgcttcatccagccatgcttcgccctgggtaatctcgccatctaccggcacgcgatcgccggtcgtcaggcgcagcaacatacctggctgcacttctgccagaggcacgcttttttcaccttcgtcagtaaccaggcgtgccgtcggcggggttaaatcgagtaacttttccagcgccttagaagaacgctggcgtgcgcgcgcttccagcatatggccgagattgatcagaccgataatcatcgcgctggcttcgtaataaagatgtcgcgcttccatcgggaaccactgcggccacaggttgacgctcatgctatagagccacgccacgccagtacccagcgccaccagcgtatccatcgtcgccgcaccgttcagcaggcttttccatgcactgcggtaaaaatggccgccggcgaaaaccatcactgccagggttatcaggccgataaccaaccacaggctgcggttgtcagcggtgaccatcatgttatcgccgatcatcccccagaccatcaccgggatacccaccgccagtgcgacaattgcctgccagcggaagcgcttcatcgtagcgacggcggtttcttgctggcgctcgcggcgtttagcgtcatcttcaatcgcttccgcgccgtagcccgctttttccaccgcctgcactaaatcttgtggggaggcactgcccatcaccagcgcagtacgctccgccaggtttacccgtgcctgagtgacgcccggtacgctttgcagcgcattttgtacgcgggtgacacagctggcgcagctcatgccgctcagcagcaactgctggctgtcatcgtcatcggcggtcgctgccggaagcgcctcagaaaccgctgtcagtgcttcgctcgggatactactctccgccagcggtttagcctttgggtggcttacagatgcgtcataacccgcttgtttgatggtttcgatcagctgttctgcactggcagtcccggtaacgtgcgcttcagtgatagacacatccgcctgctcaacatccggacgctgttcaagactttctttcacgcgtttaacgcagtgaccgcaggacaggccgtccagggtcaggtcgatagtttgactcataaaacactcctttaagacagttttgactggctgtgataaaggttaaaccttccagcaaggggaaggtcaagaaattaataaaccaggcgggtaaaagtccgtaaagattaaaaaatcggctcgatttgcatcaggattagacatttatctctttgttttcctgtagttaagttgcgggtgctaagttaaatcaggatgcctgaaaatcggcaccggggtgaggaattacctcccgcatctataaaaaggagttaacaaaagatgttagatgcaaacaaattacagcaggcagtggatcaggcttacacccaatttcacagtcttaacggcggacaaaatgccgattacattccctttctggcgaatgtaccaggtcaactggcggcagtggctatcgtgacctgcgatggcaacgtctatagtgcgggtgacagtgattaccgctttgcactggaatccatcagcaaagtctgtacgttagcccttgcgttagaagatgtcggcccgcaggcggtacaggacaaaattggcgctgacccgaccggattgccctttaacagtgttatcgccttagagttgcatggcggcaaaccgcttagcccactggtaaatgctggcgctattgccaccaccagcctgattaacgctgaaaatgttgaacaacgctggcagcgaattttacatatccaacagcaactggctggcgagcaggtagcgctctctgacgaagtcaaccagagcgaacaaacaaccaacttccataaccgggccatagcctggctgctgtactccgccggatatctctattgtgatgcaatggaagcctgtgacgtgtatacccgtcagtgctccacgctcctcaatactattgaactggcaacgcttggcgcgacgctggcggcaggtggtgtgaatccgttgacgcataaacgcgttcttcaggccgacaacgtgccgtacattctggccgaaatgatgatggaagggctgtatggtcgctccggtgactgggcgtatcgtgttggtttaccgggcaaaagcggtgtaggtggcggtattctggcggtcgtccctggagtgatgggaattgccgcgttcagtccaccgctggacgaagatggcaacagtgttcgcggtcaaaaaatggtggcaagcgtcgctaagcaactcggctataacgtgtttaagggctgatcatgatgaacacggaaggtaataacggtaacaaacctctcggtctatggaacgtcgtttccatcggcattggggcaatggtgggggcggggatcttcgcgctgctggggcaggctgcattgctaatggaagccagcacctgggtcgcctttgcttttggcggtattgtggcgatgttttccggttatgcctatgcgcgtctgggggcgagctatcccagcaatggcggcattatcgacttctttcgtcgcggattaggcaacggcgtctttagcctggcgctcagcttactgtacctgttgacgctggcggtgagcatcgccatggtcgcccgtgcttttggcgcttatgccgtgcagtttttgcatgaaggcagccaggaggagcaccttattttgctctacgcgttggggatcattgcggtgatgacgcttttcaactccttaagcaaccatgcggtagggcggctggaagtgatcctcgtcggcattaaaatgatgatcctgttattgctgattattgccggtgtctggagcctgcaaccggcgcatatttccgtctctgcgccccccagctccggtgcgttcttctcctgtattgggataactttccttgcctatgcgggctttggcatgatggcgaacgcggcggataaagtgaaagatccgcaggtcattatgccacgggcgtttctggtggcgattggcgttaccacgttgctttatatcagcctggcactggttttgcttagcgatgtaagcgcattagagttagaaaaatatgccgataccgccgtagcgcaggctgcttctccgctgctcgggcatgtgggttatgtgatcgtcgtcatcggcgctttactggcgacggctagtgccattaacgcgaacctgttcgccgtgtttaacatcatggacaacatgggcagcgaacgcgaactgccgaagctaatgaataaatccctgtggcggcagagtacctggggcaacattattgtcgtggtgttgattatgctgatgacggcggcactgaatttaggcagtctcgccagcgttgccagcgccacctttttgatttgctacctggcggtgtttgtggtggcgatccgcctgcgtcatgatattcacgccagcttgccgattcttatcgttggtacgttggtgatgttgttggtgatcgttggctttatctacagtctgtggtcccagggtagccgtgcgttgatatggattattggcagtctcttactcagccttattgtggcaatggtcatgaagcgcaataaaaccgtataacatctctctgtgcgcagtacttcctgtattattgtggtggcggtcgatattcgcactggcaaaaaaacgtgcttgaatatctgttgaaaccctttaacaaagcacaggaggcgttgcgcgaacgatgaacatcagcgatgtagcaaaaattaccggcctgaccagcaaagccattcgcttctatgaagagaaggggctggtgacgccgccgatgcgcagcgaaaacggttatcgcacctacacgcagcagcatctcaacgaactgaccttactgcgccaggcacggcaggtgggctttaacctggaagagagcggcgagctggtgaatctgtttaacgacccgcagcggcacagcgccgacgtcaaacggcgcacgctggagaaggtggcggagatcgaacgacacattgaggagctgcaatccatgcgcgaccagctgctggcactggcgaatgcctgccctggcgatgacagcgccgactgcccgattatcgaaaatctctccggctgctgtcatcatcgggcagggtgattaagagctgacggctcggatatgtagggttatcccttctatcgcaatgacttcaacatgcgtacctgcaccgagatcctcgctggcgctgacaggccaactactgtcaccgacgcgcatatgaccgcgcccgttgaccagcggagattccagcacaaaacgtcggccaatcagctgctgcccgcgctggtttaaatgactatcgctgtgcttttgttcgcgcacccgccggctcaaccatttccaccacagccaggcggcgagcagcgtcaggatggcaaacattaccccttgccactcccaacccagcggcaccagccagaccaccaggccggtaatcaccgctgccacgccgctccacaacaaataaccatttccgcccagcatctcggctgccagcagcaaaccgccgagactgagccagaaaatatgtggatgaacgaccattaactccatcatggctgagtccgtttgttggcgctgtctttcaccagctcggcaatcccggcaatgctccccatcaggctgctggcctctaatggcatcatcactactttgctgttactggaggaaccgatctgctgtaacgcttcggtgtatttctgcgctacgaagtagttcaccgcctgaatatcaccggaggcgatagcttcagacaccattttggtggcgcgggcttctgcttcggcggaacgttcacgcgcttcagcctgtaaaaacgcgctctgacgttcgccttccgctttcaggatttggctctgtttttcaccttcggctttgaggatttccgcctgacggatcccttccgcttcaagaatgtaagcgcgtttggtacgttccgctttcatctgcgcgttcatactagagataagctctgccggtgggcgcacgtcgcgaatttcaatacgggtgactttaatcccccacgggttggtggcttcatcgacaatacgcagcaggcgactgttgatgctgtcgcgctgagagagcatttcgtcaagttccatactacccagcacggtacggatgttagtcatggtcaggttgatgatcgccagctccagattgctgacttcataagccgcgcgcggcgcgtcaatcacctgaataaagcacacggcgtcgatggtaacgttggcgttatctttgctgataacttcctgggaagggatatcgagcacttgctccatcatattgatcttgcgaccaatgcgatccataaacggcaccaccagactgagccccggctgtaacgttttggtatagcgaccaaagcgttctactgtccactgatagccctgcggtacgattttgacacccgcgccgacaatgaccagcgcgacaaaaatgagaatcgggataaagataagcatcggaaaaacctcctgttgtaccgtccataatcagcaaaattgctgcttgattaaacaaattatacctgattactgaaagagagttcccccttattcctgcgaaggataaactgtttttagtaaaaatcagaaaaagggaacagcgatgcaggaaaatagtcctttgcttcagctacaaaacgtaggatatctggcgggtgatgcgaagattcttaataacatcaattttagcctgcgtgctggcgaatttaagttaattaccggtccttctggttgtggcaaaagtacgctgctaaaaatagttgctagtttgatcagcccaaccagcggaacgttactgtttgaaggtgaggatgtcagcacactaaagccagaaatctaccgccaacaagtctcttactgcgcccagacaccgacgctgtttggcgatacggtatacgataatctgatctttccctggcagatccgtaaccggcagcctgacccagccatttttctcgattttctcgaacgcttcgccttgccggacagcattttgacgaagaatatcgccgagctatctggtggtgaaaaacaacgcatcagtttgattcgtaacctgcaatttatgccgaaggttttattgctggatgaaataaccagtgcgctggatgaaagtaataaacataacgtcaatgagatgatccatcgttatgtgcgcgagcaaaatattgccgtgctgtgggtgacacacgataaagacgaaattaatcatgcggataaagtgattacactgcaaccgcatgccggagaaatgcaggaagcacgctatgaactcgcataactaaagaaatgcaggaagcacgctatgaacagccataatattactaacgaaagtttagcactggcattaatgctggtggtggtggcaatcttaattagccataaagaaaaactggcgctggagaaaaatattctctggagcgtcgggcgagcgataattcagctgattattgtcggctatgtgctgaagtatattttcagcgtggatgatgccagcctgacattattgatggtgttatttatctgctttaatgcggcgtggaacgcgcaaaaacgcagtaaatatattgctaaagcttttatcagtagctttattgccattacggtcggggcgggaattaccctggcggtgctgattctcagtgggagcattgaatttatcccgatgcaggtgatccctatcgccgggatgattgccggtaacgccatggtagcggtggggttgtgttacaacaatttagggcaacgggtcattagcgaacagcaacagattcaggagaaactgagtcttggtgcgacgccgaagcaggctagtgcgatattgattcgcgacagtattcgcgcggctttaattccgacggtcgatagtgcaaaaacggttggcttagtgagtttaccaggaatgatgtccgggctgatatttgccgggattgatccggtgaaggcgattaaatatcagattatggtgacctttatgctgctcagtaccgccagcttgagcaccattattgcctgctatttaacctatcgtaagttttataatagccgccaccagttggtggtgacgcaattgaagaagaaatgatgcgatgccggatgcgcagcatcgcatccggcgttgtggttcatgtgccgatcaacggaatatcaatacaacaatgcatacagctggcggcgatacttgctcgccagtgcatcacccgtacccagcgcagcgaggatctcctggaacgttttacgcgtctgaccgtctgcggcggtgagatctttacgcagatgcccgaacagcaactccagcgcctcttcattgcgcccaacctgatgcagttgcagcgccagttgcgtcgccagtgcggcatcttctggattctccgccacctgctgttgcaactgttgaatttccggcgtatcagccgcctgcttcagcagttcgatttgcgccaccagcccctggtagcgggtgtcctgatcctgcaacggaatggttttcagcaccgcttccgcatcttcagaacggttcagcgcaatcagcgtttctgccagcagcaggccgatctccccgttctgattgctcaactgccaggcgtctttcagcaatggcagggcatcggtgtaattgctttcctgcatcagttgcatcgcctgctgcgctttcagctcttcttcgcgcggcagcactttatccagcagggcgcggatcgcctcttccggttgcggcccctggaagccatctaccggttgcccgttctggaacagatacacggtcggaatcgcacgcagaccaaactgcgcggcaatcatctgctccgcgtcgcagtccagcttcgccagaataaattgcccgttgtactgcgccgcgaggctttccagaattggggttaactgcaaacagtgctggctacgttcagaccaaaaatagaacagcaccggagtggtcatgctctgttcaagaacctgttgcaggttagattcgttaatgttgacaatattttctacggacatggagtcgctctctgttgtcgatattttctttgacatgggggcttaagcgcgcgcttcaactcacccctgcaatattttgtccatcacgcgccccggcagcaggcgcttaagcaccattaccgcccaggtcaccagcgtcaccggatagcgcatcttcggcttctcgctaataaaagcatggcgtactttgtccaccaccgcttccggtcccaacgtaaagcgggcggcgatgccgggattttcgactggtttatcactttgcgtctggttgacgttgtcggtgaagcgagtacgaatgggaccgggttcgatcaggctgactttaattccgctgtggcgcagctccatgcgcagtgcatcactccacgcctccagcgcatatttactggccgcgtaagcgccacgacccggcgtggagattaatcccatcacgctacttgtcatcacaatacgcccttcaccgtgcggtaacatcgcgggtaacaggcgcatggtgagctggtgtgcgccgaaaaagttggcggaaaactgctgttccatctgcgcacggctgatggtggaaagggggccatacatgccgaatccggcattgttaaagatcccatacagacaattatcggtcagggcgatcacctcgtcggctgcgcgatcaacactttctggactatccagatcgatcaacacgccggtaaatcccatgctgttcatgcgctcaacatcatccggtttccggcaacctgccagcacatgaaaaccctggcgttttaattcgagcgcgctttccaggccaattccactggaacatccggtaattaagacgcttttttgcataactttacctgtcaggatctccgttgctttatgagtcatgatttactaaaggctgcaacttatttaactgtcatgatttactaaaggctgcaactgcttcgccatccagtcggcaataaacggctgggcgtcgcggttgggatgaataccgtcatcctgcatccattgtggcttgaggtagacctcttccataaaaaagggcagcagcggaacatcaaactctttggcgagtttggggtaaatggcgctaaaggcttcattataacggcgaccatagtttgcaggcagacgtatttgcattaacaatggttcagcgttggcggctttgacatcctgcaaaatctggcgcagcgtttgctcggtttgctgtggctgaaaaccacgcaaaccgtcattgccgcccagttcaaccagcacccaacgcggctgatgctgtttcagcagagccggaaggcgcgccagtccttgttggctggtgtcgccgctgatgctggcattaactacgctcgttttactctgccacttatcattcaacaaggcaggccaggccgcgctggcagacattcgatacccggcgctcaggctatcacccagaatcaataacgtgtccgctgcggcggcacggaaggttaacaggaccaggaacaggaagggcaaatgccagcggaaaacattgttgaagttcatcatcttaagaagtccgtcggtcagggggagcatgaactctccatcctcaccggagttgagctggttgtcaaacgtggcgagaccatcgcactggtgggcgagagcggaagcggtaagagtaccttgctggcgatcctcgccgggcttgatgacggcagcagtggcgaagtgagtctggtgggacaaccgctacataatatggacgaagaagcgcgggcaaagttgcgcgcgaagcacgtcggctttgtttttcagagttttatgttaattcctacccttaacgcgctggaaaacgtcgagcttccggctctgctgcgcggtgagagtagcgcggaaagtcgtaacggggcgaaagcgttgctcgaacagttagggctgggtaaacgtctggatcatcttccggcacagctttccggcggtgaacagcaacgagtggcgctggcacgagcctttaatggtcgacctgatgtgctgtttgccgacgaacccaccggcaaccttgaccgccagacgggcgataaaattgccgacctgctgttttccctcaaccgtgaacatggcaccacgttgattatggtgacccacgacctgcaactggcggcacgctgcgaccgctgcttacggctggtgaacgggcagttgcaggaggaagcatgattgcacgttggttctggcgcgaatggcgtagcccgagcctattaattgtctggctggcgctaagcctggcggtggcctgcgtgctggcgctgggcaatatcagcgatcgcatggagaagggcttaagccagcaaagccgtgagtttatggcgggcgatcgggcgttgcgcagtagtcgcgaagtgccgcaagcgtggctggaggaagcgcaaaagcgcggcctgaaagtcggcaagcagctgactttcgccacaatgacctttgcaggcgacacaccgcagctggcgaacgtcaaagcggtggatgatatctacccgatgtatggcgatctgcaaactaatccccctggcctgaaaccgcaggcgggcagcgtattgctggccccacgcctgatggcactgcttaacctgaaaacgggcgacaccattgacgtgggcgatgccaccttgcggattgccggagaagtgattcaggaaccggattccggttttaaccccttccagatggctccgcgtctgatgatgaatctggcggatgtcgataaaaccggagccgtgcagccggggagtcgggtcacctggcgttataaattcggcggcaacgagaaccagctcgacggctatgagaaatggttgttacctcagcttaaacccgaacaacgctggtacggtctggaacaggacgaaggcgcgctggggcgaagcatggaacgcagccaacagttcctgctgcttagcgcgcttctgaccttgctgctggcagtggcagcggtggcggtagcgatgaatcattactgtcgcagtcgctacgatctggtggcgatcctcaaaacgctgggggcagggcgagcgcaactgcgtaagctaatcgtcggtcagtggttgatggtgctgacgcttagtgccgttaccggtggggccataggcctgttgttcgaaaacgtgttgatggtgctgctcaagcccgttctgcctgctgcactaccgccagccagcctctggccgtggctgtgggcgcttggcaccatgacggtcatcagcctgctggtggggctacgaccatatcgcttgttgctggcaacgcagcctttacgcgtattacgtaatgatgtggtagcgaacgtctggccgctgaagttttatctgccgattgtcagtgtggtggttgtgctgctgctcgccggattaatgggtggcagcatgctgctttgggcggtgctggcgggcgcggtagtactggctttgctgtgcggtgtgctgggctggatgctgctgaatgtacttcgccgcatgacgctgaaaagcctgcctctgcgcctggcggttagccgcctgttacgtcagccgtggagtacgttaagtcagcttagcgcatttagcctctcctttatgctgctggcactgctgctggtgttgcgtggcgatctgctcgaccgctggcagcagcagctacctccagaaagcccgaactactttttaattaacatcgccacagaacaggtagcaccgctaaaagcgttcctcgcggaacatcagatagtcccggaaagcttttatccggtggtgcgggcgcggctgacggcgattaacgataagccgacagaaggtaatgaagatgaggcgcttaaccgcgaactcaatcttacctggcaaaatacgcggcccgatcataatccgattgtcgccggtaactggccgccaaaagccgatgaagtgagcatggaagaggggctggcgaaacgcttaaacgttgccctcggtgataccgtgacttttatgggcgatacccaggagttccgcgctaaagtgaccagcctgcgcaaagtggactgggaaagtctgcggcctaatttctattttattttccctgaaggggcattagacgggcaaccgcagagctggcttaccagtttccgctgggagaatggcaacggcatgttgacacaactcaaccgccagttcccgaccattagcctgttagatattggcgcgattttaaaacaggtcggtcaggtgctggagcaggtaagtcgggcgctggaagtgatggtggtactggtcaccgcctgcggtatgttgctgttgctggcacaggtgcaggtgggaatgcgtcagcgtcatcaggagctggtggtgtggcgcacactcggtgcggggaaaaaactgctgcgtaccacgttgtggtgtgagttcgccatgcttgggtttgtttccggcctggtggccgcaattggtgcggaaacggcgctggcagtgttgcaggcgaaagtgtttgattttccgtgggagccagactggcgattgtggattgttctgccgtgcagcggagcgctgctgctgagccttttcggcggctggctgggtgcgcgactggttaagggtaaggcgctgttcaggcagtttgcggggtgatgagagtccctcattaccgcgccttaacccattccgccacttccgcccactcaccgcgaaagacaactttttccgcttttttctcaagctgatagcgatacatcgggtcgtaatattcttcaagtaacggcaccagccaggccagatgaccgtcggtgctgccggtggtgagttgcgttgtcagtgctgcatccagccttgcagccagttcgttatagcgctgtagccccagccgacgcttaatcgcgctaagtccgtgatgcaggtattcgcaatactcctgccagccctgttcgtcgccgtacgcgtgggtaaaatcatgatgcatacgcaagaaatactcttcgttcaggcgctcaagacggatctcaaacggatcttctaccaccgcaatcgccgcctgagtcattcgctcgcgcaggcattccggcaggtgattgctaccgatcatccggctttcgtcttccagcacccacaggcgcaaattctgacgggcgtcggtttttagcatttcggcagccagcaggttttcaaaactcgcctggctaagttgtggttgtaacgtgcgaccaaacgcgctaccgcgatgacgcgccaacccttccagatcaacaccgttcggctgttgctgcactaacagcgttttaccgctgccggtacaaccgccaatcagcactatcggtttttgtgccagttcaatagtcgcctgaatcgcggtctggcgcagtgccttataaccgccttccaccagcggataatcaatccccgctgcatgcaaccagctttgcacaatatgactgcgctgaccgccacgggcgcagcagagaataccttgcggattttgcaggcacgctgcccgccaggcgtccatgcgctgctgacgaatttcacccgccaccagtttatgtcccagcgccagcgctgcgtcactgccttgctgtttatagcaggtgccaacggcggcgcgttcatcgttattcattaacggcagattgatagcggcgggcattgcgccgtgctcaaactcgataggggcgcgaacatcaataatgggcgtatcagcaatcagcagggcacgatagtcctgttccgtgtgtctctcttgcatagttaaaagtgaacctcaaatcagcttgcgcgctattttacgcgccaacgcgcaaggaaacttgatttttaactgcgtgggttgccgaaaatttctaaaaatccgctgatttccggcctgcgctgggtaaacaaggtcacaatatcttctaccgctttgccgctgccaaatttgcgccatgccagactcaatgggctaggagggcgcatcgttgggattacccggctgaccagttgttgattatcgatcatactctggcaaaggctttttggcaaaaaaccaatgccaacgcccgccagatgggcggcgattttcgtttccatatcgggaacaataatctctttttgccctggcaatcgccaggcgacgcgtttggttaaggtgcgggcgctgtcttcaatattgaccgccggaaagcgccgcaactgcgcttctgttagcggctcttcaacgttcgccagcggatgatccgccgccatgacaaagcgccattgcacgcttcctaagggatcaagactaaaggtatttgccagcgcctcagttcccgtgacgccgatagccaggctaaaaccttcgtacaataggctgtcccagacgcccatatagatttgtcgggagatgtgaaactgggtaaaggggtaacgctcattcagccacgccagcaactgggcgacggcctgggggttgtagagcaggttgttgatgacaatattcacctggcgttccacgccatcattcacctgttgcagctcgcttggcatactttccagccagctcagccagtctctggcctgggaaagtagatgctcgccagccgctgtcaacgtcacgctgcgagtcgtacggaaaaacagcgctactccggtattctcttccagaagtttaatgcgataactgatcgtcgccgtggttttacataatcgttctgccgctttactaaaacttcctgtttcagcaaccgcaatgaaagtccgcaaggtttctggatcgaacatcttcaggtatccccttttaaatccgcaagttgcgtgattttcttatcctctgatttatcagtatttttacatgataaccctgttcaatttgtggactaaatctagttttggaaaaatattccaacttttgtattgatgttgttctcttaaggttttagattgcctgttattgaaaccaagctgaccggtcggcggtggttgaacggaattatgttacaaggacaaaaagatgaaacttcaggtattaccgttaagtcaggaagcctttagtgcttatggcgacgtaatcgaaacgcagcaacgggattttttccatattaacaatggcctggtggagcgttaccacgatttggcgctggttgagattcttgagcaagactgtacgcttatcagcattaaccgcgcgcaaccggcgaatctgccgctgaccattcacgaactcgaacgtcatccgctgggtactcaggcctttatcccgatgaaaggtgaggtgtttgtggtggtcgtggcgttaggtgacgacaaaccagacctgagtacgctgcgggcgtttatcaccaacggcgaacagggagtgaattaccatcgtaacgtctggcatcacccacttttcgcctggcagcgcgtcaccgattttctgaccatcgatcgcggcggcagtgacaactgtgatgttgaaagtattcctgaacaggaactctgttttgcgtgacgcctgcaaccgacttgcataagataaactaattgttcattgtttatgctcacttgtaggtcggagttaacgtaggtatgacggaagttagacggcgcggcaggccaggacaggcggagcctgtggcacagaagggcgcacaggcgttagagcggggaattgcgattctgcaatatttggaaaaaagtgggggaagtagcagcgttagcgatatttctctcaatctggatttgccgctctccacgacctttcgcttgctgaaggttttacaggcagcggattttgtctatcaggacagtcaattaggctggtggcatataggattaggtgtctttaacgtcggtgcggcgtacatccataaccgcgatgtcctctccgtcgccgggccgtttatgcgccgcctgatgttactttccggcgaaacggtcaatgtcgcgatccgtaacggcaatgaagcggtattaattggtcagttagagtgtaaaagcatggtcaggatgtgtgcgccactgggcagtcgtctgccactgcatgcttccggtgcgggcaaagcgctgctttatccgctggcggaagaggagttgatgagcatcattctgcaaaccggtttgcagcagtttacgccaactacgcttgtggatatgcccaccttgctgaaggacctggaacaagcgcgtgaactgggctataccgtagataaagaagagcatgttgtaggtctgaattgcatagctagtgcaatttacgatgatgtcggtagtgttgttgccgctatctccatctccgggcctagtagtagactgacagaagatcgttttgtcagtcagggtgagctggtcagagacaccgcccgcgatatcagcacggcgttgggactgaaagcacatccataatgtctgtcgcatcccgctctgcggagcgggtttttttgacaaaatttgaaagttggaaaaattttccaataaatagaggtaggaataaaatggcaaaaatgagagccgttgacgcggcaatgtatgtgctggagaaagaaggtatcactaccgccttcggtgttccgggagctgcaatcaatccgttctacagtgcgatgcgtaagcacggcggtattcgtcacattctggcgcgtcatgtggaaggtgctagccacatggcggaaggttatacccgcgcaacggcagggaatatcggcgtatgtctggggacttccggtcctgcgggcacggacatgatcaccgcgctctattccgcttctgctgattccattcctattctgtgcattaccggccaggcaccgcgcgcccgtctgcataaagaagattttcaggccgtagatattgaagcaattgctaaaccggtcagcaaaatggcggttacagttcgtgaagcggcgctggtgcctcgcgtgctgcaacaggcatttcacctgatgcgttctggtcgtccgggtccggtactggtggatttaccgttcgacgttcaggttgcggaaatcgagtttgatcctgacatgtacgaaccgctgccggtctacaaacctgctgccagccgtatgcagatcgaaaaagctgtagaaatgttaatccaggccgaacgtccggtgattgttgccgggggcggggtaattaatgctgacgcagctgcactgttacaacagtttgctgaactgaccagcgttccggtgatcccaacgctaatgggctggggctgtatcccggacgatcatgaactgatggccgggatggtgggtctgcaaaccgcgcatcgttacggtaacgcaacgctgctggcgtctgacatggtgtttggtatcggtaaccgttttgctaaccgtcataccggcagcgtagagaaatacaccgaagggcgcaaaatcgttcatattgatattgagccgacgcaaattggtcgcgtgctgtgtccggatctcggtattgtctctgatgctaaagcggcgctgacactgctggttgaagtggcgcaggagatgcaaaaagcgggtcgtctgccgtgtcgtaaagaatgggtcgccgactgccagcagcgtaaacgcactttgctgcgcaaaacccacttcgacaacgtgccggtgaaaccgcagcgcgtgtatgaagagatgaacaaagcctttggtcgcgatgtttgttatgtcaccaccattggtctgagtcaaatcgctgcggcacaaatgctgcatgtctttaaagaccgccactggatcaactgtggtcaggctggtccgttaggctggacgattccggctgcgctaggggtttgtgccgctgatccgaaacgcaatgtggtggcgatttctggcgactttgacttccagttcctgattgaagagttagctgttggcgcgcagttcaacattccgtacatccatgtgctggtcaacaacgcttatctggggctgattcgtcagagtcaacgcgcttttgacatggactactgcgtgcaactcgctttcgagaatatcaactccagtgaagtgaatggctacggtgttgaccacgtaaaagtagcggaaggtttaggttgtaaagctattcgggtcttcaaaccggaagatattgcgccagcctttgaacaggcgaaagccttaatggcgcaatatcgggtaccggtagtcgtggaagttattctcgagcgtgtgaccaatattagcatgggcagcgaactggataacgtcatggaatttgaagatatcgccgataacgcagcggacgcaccgactgaaacctgcttcatgcactatgaataagggagataaataatgttacgtttctctgctaatttaagcatgttatttggagaatatgattttctcgcccgttttgagaaagctgcgcagtgtggttttcgcggcgttgaatttatgtttccttatgactacgacattgaagaattaaaacatgtgctggcgagtaataaactcgaacatacgctgcacaatttaccggcgggtgactgggcggcgggggagcgcggtattgcctgtattcctggccgtgaagaagagtttcgggatggcgtagcagcagcgattcgttatgcccgtgcgctgggtaataaaaaaattaactgtctggtcggtaaaacgccggctggtttcagcagtgaacagattcacgcaacgcttgtagaaaacctgcgttatgccgcgaatatgctgatgaaagaagatattttattactgattgaacctattaaccattttgatattcctggtttccatctcaccggaactcggcaggcgctgaaattgattgatgatgttggttgctgcaatttgaaaattcagtatgacatttatcatatgcagcggatggaaggtgaattaaccaacaccatgactcagtgggctgataaaattggtcacctgcaaattgccgataatccgcatcgcggcgaaccgggaaccggagaaattaattatgattatctctttaaggtaatcgaaaattctgactacaacggttgggttgggtgtgaatataaaccccaaaccaccacggaagccggtttacgctggatggatccgtaccgttaaaacgtaacgctattcagacaatgcttttttaggccgctaagttggcaggggatcgtgttgtctgaattcaggaaaagcgaaatttaaaagaggttaattatgaaactgggatttattggcttaggcattatgggtacaccgatggccattaatctggcgcgtgccggtcatcaattacatgtcacgaccattggaccggttgctgatgaattactgagtctgggtgccgtcagtgttgaaactgctcgccaggtaacggaagcaagcgacatcatttttattatggtgccggacacacctcaggttgaagaagttctgttcggtgaaaatggttgtaccaaagccagcctgaagggcaaaaccattgttgatatgagctccatttccccgattgaaactaagcgtttcgctcgtcaggtgaatgaactgggcggcgattatctcgatgcgccagtctccggcggtgaaatcggtgcgcgtgaagggacgttgagcattatggttggcggtgatgaagcggtatttgaacgtgttaaaccgctgtttgaactgctcggtaaaaatatcaccctcgtgggcggtaacggcgatggtcaaacctgcaaagtggcaaatcagattatcgtggcgctcaatattgaagcggtttctgaagccctgctatttgctagtaaagccggtgcggacccggtacgtgtgcgccaggcgctgatgggcggctttgcttccagtcgtattctggaagttcatggcgagcgtatgattaaacgcacctttaatccgggcttcaaaatcgctctgcaccagaaagatctcaacctggcactgcaaagtgcgaaagcacttgcgctgaacctgccaaacactgcgacctgccaggagttatttaatacctgtgcggcaaacggtggcagccagttggatcactctgcgttagtgcaggcgctggaattaatggctaaccataaactggcctgatacccgcaataaaaatggccgatatcagaaaatgaatcggccagcaatattaaaaaagaaagcagccaaagatgttgctagtgtattaaaaataatatttttattttatttgttcctcatagctagattaaaacaacgttatagcatacgtgaaattaagagggatttatggaacatcagagaaaactattccagcaacgcggctatagcgaagatctattgccgaaaacgcaaagccagcggacctggaaaacatttaactattttaccttatggatgggtagcgttcataacgttcccaattatgtgatggtcggcggcttttttattctcggcttgtctacctttagtattatgctggcaattatcctcagcgcctttttcattgccgcggtaatggtattaaacggtgctgcgggcagtaaatacggtgtgccttttgccatgatcctgcgtgcttcttacggtgtacgtggtgcactgtttcccggattattaaggggcggaattgccgccatcatgtggtttggtttgcaatgttacgcggggagtctggcctgcttgattctgattggcaaaatctggccgggatttttaactctcggtggtgatttcactctgttaggcctttctctaccgggcttaattactttcttaatcttctggctggtcaacgttggtataggttttggcggtggcaaagttttaaataaattcactgccattcttaacccgtgcatctatatcgttttcggcggtatggcgatttgggcgattagtctggtcgggatcggtccaatctttgactacattccgagcggtattcagaaagcagaaaacggtggcttcctgttcctggtggtgattaacgcggtagttgcggtctgggcggcaccggcggtgagcgcatccgactttacgcaaaacgcccacagctttcgtgagcaggcgctggggcaaacgctgggtttagttgtggcctatattctgtttgcggtcgccggggtatgtattattgccggagccagtattcactacggcgctgatacctggaacgtgctggatattgttcagcgttgggacagcctgttcgccagcttctttgcggtactggttattctgatgacaactatctccactaacgcgaccggtaatattattccagccggttatcagattgccgccattgcaccgacaaaactgacctataaaaacggcgtactgattgccagtattatcagcttgctgatctgcccgtggaaattaatggaaaatcaggacagcatttatcttttcctcgatattatcggcggaatgcttggtccggtaattggtgtcatgatggcgcattattttgtggtgatgcgcggacaaattaatcttgatgaactgtataccgcacctggcgattataaatattacgataacggttttaacctcactgcgtttagtgtaactctggtggccgttattttatctcttggcggtaagtttattcactttatggaaccgttaagccgtgttagttggtttgtcggcgtcatcgtcgcctttgcggcctacgccttattaaagaaacgtacaacagcagaaaaaacaggagagcaaaaaaccataggttaattaatcccgatattgaacattgagttaaaaaccaatctgtattttacaaggagtttgttatgtcttttgatttaatcattaaaaacggcaccgttattttagaaaacgaagctcgcgttgtagatatcgccgttaaaggcggaaaaattgctgctatcggtcaggatctgggcgatgcaaaagaagttatggatgcgtctggtctggtggttagcccgggcatggttgatgcgcacacccatatttctgaaccgggtcgtagccactgggaaggttatgaaaccggtactcgcgcagcggcaaaaggtggtatcaccaccatgatcgaaatgccgctcaaccagctgcctgcaacggttgaccgcgctagtattgaactgaagttcgatgccgctaaaggcaagctgactattgatgcggcacaactcggtggcctggtgtcttacaacatcgaccgtctgcatgagctggatgaagtgggcgttgtcggcttcaaatgcttcgttgcgacctgtggcgatcgcggtatcgacaacgacttccgtgatgtaaacgactggcagttcttcaaaggtgcgcagaagctgggcgaactgggtcagccggtgctggtgcactgcgaaaacgcgctgatttgtgacgaactgggcgaagaagcgaagcgtgaaggtcgcgtaaccgctcatgactatgtggctagccgtccggtatttaccgaagtggaagcaattcgccgcgtactgtatctggcgaaagttgctggttgccgtctgcacgtttgccacgtcagcagcccggaaggtgttgaggaagtgactcgtgcacgtcaggaaggtcaggacgttacttgtgaatcctgcccgcattactttgtactggataccgatcagttcgaagaaatcggtactctggcgaagtgtagtccgccgatccgcgatctggaaaaccagaaaggcatgtgggaaaaactgtttaacggtgaaatcgactgcctggtttccgaccactctccatgcccgccggaaatgaaagccggtaacatcatgaaagcatggggcggtatcgccggtctgcaaagctgcatggacgtgatgttcgatgaagcggtacagaaacgcggtatgtctctgccaatgttcggcaaattaatggcgactaacgcagcagatattttcggtctgcagcaaaaaggccgtatcgccccaggaaaagatgccgacttcgtcttcattcagccgaatagcagctatgttcttaccaatgacgatctggaatatcgccacaaagtcagcccgtatgttggccgtaccattggcgcgcgtatcacgaaaaccatcttacgtggtgatgtgatttacgacattgaacagggcttccctgttgcgccgaaaggtcaatttatccttaaacatcagcagtaatctggcccctgcaatgcccgtccttgcggcgggcattctccggttaaggtgtgtttatgttcaattttgcagtcagccgcgaaagcctgttaagtggatttcagtggtttttctttattttttgcaacacggttgtggttcctcctacgctactttctgcttttcagttgccgcaaagtagcctgcttacgctcacgcaatatgcttttcttgctaccgcactggcctgcttcgctcaggcgttttgcggtcatcgtcgcgctattatggaagggccaggtggcctgtggtggggaaccatccttactatcacccttggtgaagcaagccgcgggacaccgatcaacgatatcgccaccagcctggcagtggggattgcactctccggcgtgctgacgatgttgattggttttagcggattaggccatcgcctggcacggttatttacgccgagcgtgatggtcttgtttatgttgatgctgggcgcgcagctgaccactatctttttcaaaggtatgctcgggctgccgtttggcatagccgacccgaattttaaaattcagttaccgccgttcgcgctcagcgtggcggtgatgtgcctggtactggcgatgattatcttcctgccgcaacgttttgcccgttatggcctgctggtcggcaccataaccggctggttgttgtggtacttttgctttccttctagccacagcctctccggtgagttgcactggcagtggttcccgctcggcagtggcggtgctttgagcccgggaattattctgacggcggtgattacaggtctggtaaatatcagcaatacctacggtgcgattcggggcacggatgttttttatccgcagcagggcgcagggaatacgcgttatcgtcgtagctttgtggcgaccggatttatgacgctgataaccgtaccgctggcggtaattccatttagtccgtttgttagttccattggtttattaacccagactggcgattacacgcggcgtagctttatttatggcagcgttatttgcctgctggtggcgctggttcctgcactcacgcgactgttttgcagtatccctttacccgtgagtagtgcggtcatgctggtttcttatctgcctttactcttttccgcgctggtgtttagccagcaaataacgtttaccgctcgcaatatttatcgactcgcattgccgttatttgtcggcatatttttaatggcattaccgcctgtgtatctgcaagaccttccattaacgcttcgtcctctgctcagtaacggcttattggtcgggattttactggctgttcttatggataaccttattccgtgggaacgcatcgaataatttgttgaaaaaggattgataatgaagattgtcattgcgccagactcttttaaagagagcttaagtgcagaaaaatgttgtcaggcaattaaagccgggtttagcaccctctttcccgatgcgaactatatctgtttgccgatagcggatggcggcgaagggacggtggatgcgatggtcgccgcgacgggcggcaacatcgtgacgcttgaagtctgcgggccgatgggcgaaaaagtgaatgctttttatggccttaccggcgacgggaaaacggcggtgattgagatggcggcagcaagtggcctgatgctggtcgcgcctgaaaagcgtaatccgttgctggcctccagttttggtacgggggagttaattcgtcatgcgctggataacgacattcgccatattattctcggcattggcggcagtgcgacggtcgacggcggtatgggcatggcgcaggcgctcggtgtgcgtttccttgatgccgacggtcaggcgctggcggcaaacggtggtaatttagcgcgcgtggcaagcattgagatggatgaatgcgatccgcgtctggcgaattgccatattgaagtagcatgtgacgttgataacccgctggtaggggcacgcggcgcggcggcggtgtttggcccgcaaaaaggggcaacgccggagatggtcgaagaacttgaacaggggctgcaaaattacgcccgtgttttacaacagcaaactgaaattaatgtctgccagatggcgggcggcggcgctgcgggcggtatgggtattgcggcggcggtatttctcaatgcggatattaaaccgggcattgaaattgtgttgaatgcggtcaatcttgcgcaggcagtgcagggcgcagcactggtgattaccggggaagggcgcatcgacagccaaacggcaggcggtaaagcgccgctgggtgtggcgagcgtggcgaagcagtttaatgtaccggtgattgggattgctggcgtattgggtgatggcgtggaagtggtgcaccagtacggcattgacgcggtattcagcattttgcctcgtctggcacctttagccgaagtgctcgccagcggtgaaaccaatctcttcaacagcgcgcgaaatattgcctgcgccattaaaataggtcagggaattaaaaactaacccttacctttaaagcggatgcgatttatatcgcataagagtgcagtactcatgccggatgcggcatgagtaccatatccttcctgaaaatcgcgcaaattctatatattgcagagatcatgtaggcctgataagcgaagcgcatcaggcaatgttacaaaaaaagccacggtataaaccgtggcaaaatccaacatagctaaaaataatcaggcgagtggtatgacttaaatctctacgtcgcggttacaatctttgctgtaaatatagctgaacgcttcaccacgccctacaccataaccagcctgtaaagaataagcgcccataaagatgtaatcgccttttttcaccgggatccagttattgtcgaggttataaaccccctgaccggaaagaatataggcaccgtgttcctgaacgtgtgtttcgatataaccgtggctggcacctggtgcaaaagagaggatatgcatgttcatatcaaaacctaactctttgggcagaaaatccagcagaataacatcgtccatgccttcataatgaatgcgttccagttcgctggcattgccagaaaccagccacggtgcatagccttctaccggaacatagcggcgcttatataaaaagatttggctgtcttcggcctgggcgttaacaaacgtcattaaggagcctggcgggcaataaagatagccaccttcgcttaaggcaaatgttttgccttcggctttggcagtgatatttccagagatcacatacaggaacgtttcaatgccttcgccaccgaagccctgttggttgccaccgttttgatgcagtgtgaccagataatcaacaaaagaggcacccagctttggcgtggagaggattgtcgcgtcacaattttcaaagcccggaataatattttttaccagaccatccggggttaacagtgcgaaattaccgtgtttaacaatcgcacggttagccagtaaatcttcgcggtaaccggtgacgttatttaaatatcccatttatgactccttatttctgccaggcaagttgataaagcatgagtgccaacgttttgaccccttcggcaaggtcggtaatattggtgcgttccgccgggttatggctgatcccgttgatgctggggataaaaatcatgcaggttggtacgcgaggcgcgaaaatttgcgcgtcgtgcccggcaccactgtgcatcacccggtaattcagtttttctctttcacacaattctgtcagggtggcgaccagctccttattcatcggcacgggttcttcgtccatccataaatcgatatcaataccaatgtccatttcatcgcaaatcgcccgcatgtcgttttctaactgttgggtgaaatcgcgcagcacggcagcgtcggtatgacgacaatcaatggtgaacgtggttttacccggcaccacatttaccgtattcgggcgcggctctactttgccaaaggtcagaaccagcggatcgcccatccttttcgctttttcgacgctctgatggcaaatgcgactgaaagcgtaaactgtatcacgacgataacccatcggcgtggtgcctgcatggttactttcgccgttcagcgttaccgtataacgacgctgcccgacaattgcattcaccacgccaatactttgcccattactttccagcacacagccctgttcaatatgcagttcaacaaaggctttaatatcctgacgcggagttagtggggcgttcggaagagtaaatccgcaagccttcatcgcatcgacaaaactatttcctttggcatcacagatattccgcacgtcgtcaggattcgccagcccaaaaatatttttactgccccagaagacatacgggaagcggctgccttcttcttctgccatcgccaccacttcgaccgtacgtagcggcgcgccgtattgcgttttcagccagtcaattgccagccacgccgccagcgcgccgaattgcccgtcaaggttaccgccgttaaccacggtatcgatatggctaccgctcagaaccacttcctgtggatattcggtgccattcaggcgaccgtataaattccccacttcatcgaaacgtgtttccagcccgcttgctgccattctttttttaaattgctgctgggtttccagccattccgggctataaagtaaacgggtcatcccacccgctgggtcagcgccaaaagaggaaagccagggcagcgtttcttctatagcttgacggaaatgtgtaatcataagaaagtcctgtctcaataattattgcgcaaagggatttttcgtttcgtaactcgtgttataaagcgcgtcggaaattaaatactggtaaatatcatcaacaatttcgatgccttcgacggcggctttgcgttgtttaatatcctgatcctgtccgggataataaacctgattaaaaccgggcgcgggggtaatggcatttaattcgcgcatggtctggctaagatgttgacggaataattcgctggaggagaaaaagttcggattaataactatatgtaattgccccaaattacgccctgcgtgtaaatcgtcatacatgctactaacctgtcgcccgaacggtaagccgagtaagacgccactgaggacgtcaatcatcatcatcaggccatacccttttggcccggcggcggggagcagagcatgtaccgcgaacggatcggttgttggtacaccgtttttatcgaccgcccaggtatccgggatagacatattacggctgcgggcgtcgagcacttttccccatgcctgtacggtagtcgccatatcaaaggtaaggatctcgtcgccttctcccggcgcggcaaaggccagggggttagtaccgtagtaaatttccgcgccgccaaacggcaccaccattggatcggactggcacatgctaatgccaatgaatccggcgcgggctgcctgctgcacaaaataagagattgcgccgctgtgacccatccggctgataccgaccaccgcaacgccattttgctgggcggttttgatggcatgttccatacccattttcgccgcgacctgtccggcggcattgtcggcatgtaaaattgcgctgcacggcccggtttcctcaagacgaaactccggttcgcggttggtgccgcctttactaatgcgttccgcgtagtattccacgcgcaccgcgccatgagagtggatccctctggcatcggcgtaaaccaatacttcagccacggttgcagcgtgctcacgttttaacccagcctggcagagtttattctcaattagctggtggagtgtttcccgactgattttcatctgtcttcctttttaacgacggtgtgaagcatgactgcaattaacatacagggaaaatatctggattatgtgatccagacaggcaaaaaaatatagttagaatttatttgataatccgctcacttttaacctgatttttaaaacaacaacgcttattaaaaaataatgagtaatagcctggtggttatttgaattcttttgttaataattcctgtgtgatattcatcaccttatttactcgttgtcatcgataccgtaatcgccacattaacactgctcgtgcaattgccatgggtgcaatttttaaggagttgttatgatccacgcctttattaaaaaagggtgttttcaggatagcgtcagtttaatgattattagtcgaaaactcagcgaaagtgaaaatgttgatgatgtttccgtaatgatgggtacgcccgccaataaagcgttattagataccacaggtttctggcatgacgattttaataacgccacgccgaacgatatttgcgtggcaattcgtagcgaagcggcggatgcggggatcgcgcaggcgattatgcagcagcttgaagaggcgctaaaacaactggcgcaggggagtggcagcagccaggcgttgacgcaggtgcgtcgctgggacagtgcctgtcagaaattacccgatgccaatctggcgctgattagtgtggctggcgagtatgcggcggagctggcaaaccaggcgctggatcgcaacctcaacgtgatgatgttctccgataacgtcacgctggaagatgaaatccaacttaaaacccgcgcgcgggaaaaaggcttgctggtgatggggccggactgcggtacgagcatgattgccggcacaccgctggcttttgctaacgtgatgccggaaggcaatattggcgtcattggcgcttccggtaccgggattcaggagctgtgtagccagattgcgctggcaggggagggaattactcacgcgattggccttggcgggcgcgacctcagccgtgaagtgggcggcatcagtgcgctaacagcgctggaaatgctcagtgcagacgagaaaagcgaagtgctggcatttgttagtaaaccacctgccgaagctgtgcgtctgaaaattgttaatgccatgaaagcaaccggcaaaccgacggtggcgctgtttttaggttataccccggcggtggcccgcgacgagaatgtctggtttgcctccagcctggatgaggccgcacgcctggcttgcctgcttagtcgcgtcacggcgcgacgtaacgcaatagcgcctgtcagcagcggatttatttgcggtttgtataccggcggtacgctggctgccgaagcggcgggattacttgccggacaccttggcgtggaagccgacgatacccatcaacatggcatgatgctggacgccgatagccaccagattattgacctcggcgatgatttctacaccgtcgggcgtccccatccgatgatcgacccaaccttacgcaaccagttaattgccgatctcggcgctaaaccgcaagtgcgcgtgttgctgcttgatgtcgtgattggcttcggtgcgaccgccgatcctgccgccagcctggtgagcgcctggcaaaaagcctgtgccgcgcgtttagataatcaaccactgtatgccattgccacggtgacaggcactgaacgtgacccgcaatgccgcagccagcaaatcgccacgctggaagatgcggggattgcggtcgtgagtagcctaccggaagccaccttgctggcggcagcgttaattcatccgctcagccctgccgcacagcaacacacaccgagtttactggaaaacgtcgccgtgattaacatcggattacgcagctttgcgctggagctacaaagcgccagcaaaccggttgtgcattaccaatggagcccagtcgccggtggcaataaaaaactggctcgtttattagaacgtttgcaataaggggttcccatgtttacatcagtggcgcaagccaatgctgcggttatcgaacaaattcgtcgcgctcgtccacactggctggatgtgcaaccggcttcttcacttatcagcgaactaaacgagggcaaaacactgcttcacgccgggccgccaatgcgctggcaggagatgaccggacccatgaaaggggcgtgcgtgggcgcatgtctgttcgaaggttgggcgaaagatgaagcgcaggcgctggcaatactggagcagggggaagtgaacttcattccttgtcaccatgtgaatgccgtcgggccaatgggcggtattacttctgccagtatgccgatgctggtggttgagaacgtgaccgacggcaaccgggcgtactgcaacctcaacgaaggtatcggcaaagtgatgcgttttggcgcttacggcgaagatgtcctgactcgccatcgctggatgcgcgatgtgttaatgccagtattaagcgcggcgctggggcgcatggagcgcggtatcgatctcacggcgatgatggcgcagggcattacgatgggcgatgagttccatcaacgcaatattgcttcctctgcactgttaatgcgtgcgctggccccacaaattgctcgcctcgatcatgataaacagcacatcgccgaagtgatggatttcctcagcgtgaccgatcagttcttcctcaacctcgcgatggcttactgcaaggcggcgatggatgctggcgcgatgatccgcgcaggcagcatcgtcacggcaatgacccgcaacggcaatatgttcgggattcgggtaagcgggctgggcgaacgctggtttactgcgcctgtaaacactccgcaaggtctgtttttcaccggcttctcgcaggagcaggcgaacccggatatgggcgatagcgcgattaccgaaacctttggtatcggaggtgcggcaatgatcgcagcgcctggcgtaacgcgctttgtcggtgcgggtggcatggaagcggcaagagcggtatctgaagagatggcggaaatttaccttgaacgcaatatgcagttgcagatcccaagctgggattttcagggcgcgtgcctggggctggacattcgtcgcgtggtagaaaccggcattacgccactcatcaataccggtatcgcccataaagaggcggggatcgggcagattggcgcaggcaccgtgcgggcaccgctggcgtgctttgaacaggcgctggaagcactggctgaaagcatgggtattggttgaggaacgcgcaatgacgatcatccatcctctgcttgccagtagtagcgcaccgaattatcgccagtcctggcggttagcgggagtgtggcggcgggcgattaacctgatgacggaaagcggcgaactgttaacgttgcatcgtcagggtagtggtttcggccccggaggatgggtgcttcgccgtgcgcaattcgatgcgttatgcggtggattatgcggcaatgaacgaccacaggttgtggctcaagggattcgcctcgggcgtttcacggttaaacagccacagcgttattgtttgctgcgtattacgccgcctgcgcatcctcaaccacttgcagctgcatggatgcaacgcgcggaggaaaccgggcttttcgggccactggcgttggcggcaagcgatccgctgcctgctgagttacgccagtttcgtcactgttttcaggccgcgctcaatggcgttaagaccgactggcggcactggctgggtaaaggccccggattaacgccgagtcatgatgacacgctgagcggaatgctgctggcggcctggtattatggcgctttagatgcgcgctccggtcgtccgttttttgcctgttccgacaatctgcaactcgttaccacagcggtgagcgtcagttatttacgttatgccgcgcaaggatatttcgccagcccactcctgcactttgttcatgctctgagttgcccgaaacgtaccgctgttgcgattgatagcctgctggcgctggggcatacgagtggggcagatacgctgctggggttctggcttggccaacaattattacaaggaaaaccatgaaaacactggttgtggctcttgggggcaacgccttactccagcgcggtgaggcgctgacggcagaaaatcaatatcgcaatatcgccagtgctgtacccgcgctggcacgcctggcccgttcttatcggttggcgattgttcacggcaacgggccgcaggtggggctgctggcattgcagaatctggcgtggaaagaggtagaaccgtatccgctggatgtgctggttgcggaaagccaggggatgattggctatatgctggcgcagagtttgagcgcacagccgcagatgccgcccgtgacgacggtgctgacgcgcattgaggttagccctgatgatccggcgtttttgcagccagagaaatttattggtccggtttatcagccagaagaacaagaggcactggaagcggcttacggctggcagatgaaacgtgatggtaaatatttgcgccgggtggtggcgtctccgcaaccgcgtaaaattctcgacagcgaagccatcgagttgttgctcaaagaggggcatgtggtgatttgcagtggcggcggcggtgtgcctgtgacggatgacggagcagggagtgaagcagtgattgataaagatctcgccgctgcgttgctcgccgagcagattaatgcagatggactggtgatcctcaccgatgctgatgcggtatatgaaaactggggaacgccgcagcaacgtgccattcgccatgccacaccggatgagttagcgccatttgccaaagccgatggtagcatggggccgaatgtaacggcggtgagtggttatgtcagaagccgtggtaaacccgcgtggattggggcgttaagccgaattgaagagacgctggcgggcgaagcggggacctgtattagcctgtaatcgtaggcattagacatttgtgcctgatgcgacgcttgacgcgtcttatcaggcctacaaccggtgccgcatccggcaattggtgcacaatgcctgatgcgatgcttgacgcatcttatcaggcctacaatgggtaccggatcggtaggccggataaggcgtttacgccgcatccggcaagaatagagcaccagttaaccgaacttactctgcgcccaaatcacgccgctggcatattccggcggcagcagcgggattaaggcttccagcgtcgcagtcagacggcttgtgtcgctgtcggtcaaattcagatgccccactttacgccccggacggacttctttgtcgtaccagtgcagatgcaccagcggcagtttcagccagtcataattcacatcgctaccaatcagattgatcatcacgctcggattattcaccactggttgcggtaacggcagatcggtaatcgcccgcagatgcagctcaaactggctgatgctggcaccgttttgtgtccagtgaccgctgttatgcacacgcggtgccagttcgttgatcaacagaccttgcggggtgacaaaacactccatcgccatcacgcccacatagcccagctcctgcataatcgcgctcagcatctcttcggcttgcgcctgctgctgtgcgttggcctgcggaaaagcgacgctggtgcgcaaaataccgtcctgatgcaggttatgcgtcagcggataaaacacggtgctgccatcaaagccgcgcgcgccaaccaggctcacttcaccagagaagttaatgccctgctcgacaatacattcgccgtaacactctgccggtaactgttcggtttcatttgcgcgtaaacgccattgaccgcgaccgtcataaccaccagtgcgacgcttaacaatcgccagctcacctaaacgatcaaacaccgcaggccactcgctgcgttcggcaagtaactgccacggtgcagtcggcaggtggagcttatcgaaaagctgcttctgagtcagacggtcagcaataatcgggaacacatcgcggttcacaaaggccggatggcgcgccagctcgcgggttaatgcggtttccggccagcgttctatctcagcggtaatcacgctttgttgaaaaggcaccgccgccggttcagcgtccagcccgactggccagacagcaatgcctaacggttcgcctgcctgacgcagcatacggcctaactgcccgttaccgaggacgcaaacctgtttcatgccgcacctcgcgggtccgggttttccagcacttcgtcggtctgggctttgcgccagtcattcagacgctggtgcagttctttatcatgagtcgcaagaatttgtgctgccagtaacgccgcgtttgccgcgccagctttaccaatcgccagcgtacccaccggaatgccgcgcggcatttgtacgatggagtagaggctatcgacaccgctcagtgcggcgctctgtactggcacgcccagcaccggcaccagcgttttggcggcaatcatgcctggcagatgcgctgcgccgcctgcgcccgcaataatcacctgataaccgttctcttcggcgctttcggcgaagctgaacagtttatcgggggtgcggtgagcagaaaccacttcaacgtggtgcgggacattcaggatttcgaagatttcggcggcgaactgcatggtagcccagtcgcttttggaccccatcacgatggcgacacgcgccggattattgcgggaagacatgcgtcttaaaactcctgtggtgcacaactctcggctttagagggcacagagaatagcacggaaagagagcaaggaaaacggttgcgtggctgtgaaatcagcaaagttgcgggttttttaaaacggaaaatgaatcagctcaacgtcatccgccgtgactttcaccatactaccttccgtatgccaggcacccagtaccacgcgaaaagcaggttgctgattggcgataagttcatgcaccgccgggcgatgggtatgcccgtggatcagccattgcacctgatgtttttccatcgcactgaccaccgcgttttggttaacgtccatgatcgccaggcttttactgctgttggcttctttgctgttcgcgcgcattcgcgcggcaatgcgtttgcgcacaaacaacggcagggcgaggaatagcgtctgcagccagggtttgtggaccttggcgcgaaaagcctgataacccgcgtcatcggtgcacagcgtgtcgccatgcataatcaacacccggcgaccataaagttcgagcaccttttcttccggcaataacgtcatgccactttcacgggcaaagcgtttgccgagcagaaaatcacggttgccatgaatgaaataacagggaacgccggaatcggacaccgctttgatcgccgccgccatcttgcgatggagtgggttgggatcgtcgtcgccaatccatgcttcaaacagatcgccaagaatatacagcgcgtcggccttgcgggcttcccccgctaaaaaacgcagaaaaccggcggtgatcgccggttcttccacgcagagatgaagatctgcaataaagagtgtcgccacgattactcgctaacggtcacgctttcaatgataacgtcttcttttggcacgtcctggtgcataccgctacgaccggttgcaacacctttgattttgtctaccacgtccatgccgtcaaccacttcagcaaacacgcagtagccccaaccttgcaggctttcgccagagaagttcaggaagtcgttatcaaccacgttgatgaagaactgtgcagttgcagagtgcggagcctgagtacgtgccattgccagcgtaccacgggtatttttcaggccgttgttggcttcgtttttgatcggttctttggtggctttttgtttcatgcccggttcaaaaccgccgccctgaatcataaagccgttgataacacggtggaaaatggtgttgttgtaaaaaccttcgcggcagtagtccaggaagtttttaactgtttcaggtgctttatcgtcaaaagttttgatgacaatatcgccgtgattggtgtggaaagtaaccatttttgcatcctgttccgtttgattggtgcttcaacccagttcgggtcatatatagggtggtgttatagcataaccgcacgatcggatcatcacgcaatgtatgctgattcgcgcgggaaatatgggtattatacgcaactcaattacccacacatgtctaaacggaatcttcgatgctaaaaatcttcaatactctgacacgccaaaaagaggaatttaagcctattcacgccggggaagtcggcatgtacgtgtgtggaatcaccgtttacgatctctgtcatatcggtcacgggcgtacctttgttgcttttgacgtggttgcgcgctatctgcgtttcctcggctataaactgaagtatgtgcgcaacattaccgatatcgacgacaaaatcatcaaacgcgccaatgaaaatggcgaaagctttgtggcgatggtggatcgcatgatcgccgaaatgcacaaagattttgatgctttgaacattctgcgcccggatatggagccgcgcgcgacgcaccatatcgcagaaattattgaactcactgaacaactgatcgccaaaggtcacgcttatgtggcggacaacggcgacgtgatgttcgacgtcccgaccgatccaacttatggcgtgctgagccgtcaggatctcgaccagctgcaggcaggcgcgcgcgttgacgtggtcgacgacaaacgcaacccaatggacttcgttctgtggaagatgagcaaagagggcgaaccgagctggccgtctccgtggggcgcgggtcgtcctggctggcacattgaatgtagcgcaatgaactgcaagcagctgggtaaccactttgatatccacggcggcggtagtgacctgatgttcccgcaccacgaaaacgaaatcgcgcagtccacctgtgcccatgatggtcagtatgtgaactactggatgcacagcgggatggtgatggttgaccgcgagaagatgtccaaaagcctgggtaacttctttaccgtgcgcgatgtgctgaaatactacgacgcggaaaccgtgcgttacttcctgatgagcggccactatcgcagccagttgaactacagcgaagagaacctgaagcaggcgcgtgcggcgctggagcgtctctacactgcgctgcgcggcacagataaaaccgttgcgcctgccggtggcgaagcgtttgaagcgcgctttattgaagcgatggacgacgatttcaacaccccggaagcctattccgtactgtttgatatggcgcgtgaagtaaaccgtctgaaagcagaagatatggcagcggcgaatgcaatggcatctcacctgcgtaaactttccgctgtattgggcctgctggagcaagaaccggaagcgttcctgcaaagcggcgcgcaggcagacgacagcgaagtggctgagattgaagcgttaattcaacagcgtctggatgcccgtaaagcgaaagactgggcggcggcggatgcggcgcgtgatcgtcttaacgagatggggatcgtgctggaagatggcccgcaagggaccacctggcgtcgtaagtaattgcgctattgccggatgcgagttttcgcatccggttatcgtctgcgccaccacaacattcccatcagtagcatccccggcaaccacacccacatcaattcagaaataatcacctgatgcccgtacggcgtggtgtaacgagacaatgcaaacggcgcgacttttatcacctgccagggagcgaaaaagcgttcatcactccacggccacagccagccaacgcctttaccgccagtggttacgctatccagcaagctgtggcttagcaagctgacggttaaaaacagccagcagcgaatcagcccagccctgaaccatcggcgtccaataaacacacataacagcgggacaacaaacgcaaacaccaggctatgggtaaacccgcgatgaccaaaaacattgccgtaagcaacgccaaatttaaagctcaatacgtcggcgtcgggcagcatcgccaggatgattccggcaaataacagacgcggagggatgactttgctacccaaccctaaaccaatgcataggggaacggcggcgtgcgtaataacggttggcatgatggtcgcttcggcaaaatgtcgatgctatcagcatggatgaacggggcgtagagggcaaaagtctgaaaagagaaccggcctgttgatacaggccgggaaagggatcaggcaacaacctgtacgctgtgacctgcaaaactcactgtctgaccggcgacgattttgcagcgtttgcgcgtttcaaccgcaccgtcgactttcacctggccttcggcaatcgcgattttcgcctgcgcgccgctttcgctccagccttccagtttcagcaagtcgcacagctcaacgtgcggatgtttacctaaagaaaatgtcgccatgttactcatcctgtggatcatgatattcaacgcacgcctgtagcgtgttttcaatcagcgtggcaaccgtcatcgggccaacgccgccgggaacaggcgtaatgtaactggcgcgtttagccgcgtcttcaaacacgacgtcgcccacaactttgccattttccagacggttgatgccgacatcaatcacaattgcgccttctttgatccagtcaccgggaataaagcctggcttgccaacggcaacgatcaatagatcggcattttctacgtgatgacgcagatttttagtgaagcggtgagtcactgtagtggtgcaacctgccagcagcagttccatgctcatcgggcggccaacgatattgcttgcgccaatcaccacggcgttgaggccgaaggtatcaatgttgtaacgctcaagcagcgtgacgataccgcgcggggtgcagggacgcagacgcggcgcgcgctggcacagacgaccgacgttgtaaggatggaaaccgtccacgtctttgtccggatgaatacgttccagcactttgacgttatcaatacccgccggtaacggcagttgaaccagaatgccatcgatggtgttgtcggcattcagcgtatcgataagctccagcagctccgcttcgctggtggtttccgggaggtcataagagcgggagacgaacccgacttcttcacaagccttgcgtttgcttgcgacataaatttggcttgcagggttactacccaccagcacaacggccagtcctggtgcccgcagtccggctgcaatacgcgcctgaactttttgagcaacttcagagcgcacctgctgcgcaatcgttttaccgtcaataatctttgctgccatcagagagaggattccatctgttacgtagatcgaaggggatgcgcctattttgtcagaagcggggcgcgctgtcaggtttcgtttcagatttatcgcgtgaagcgacctcttgcgaaggtgaggcgcaccgtcgctgagactgaaagcttcatttttcgtccatgatggcgttgtaaatctggaactgatttatttccttgtctaaggattaagataatttaagaaatacctgacaatataaaaagaattttcagcctggtaatttaccgcttcaggtctatatttgtgttgaatatattttgcgcggaagtattcatctaacggggctctctattttttagaatagagtgcatattttcaattaagacattcttagaggataaaaaggaatttactactatcagtgtcttaaataaagtaatcggttatatacggatgtggagtcgataaatgagattgaaggaatatatatgaaattaagatttattagctctgcgctggctgccgcactattcgccgctacgggtagttatgctgccgttgtagatggcggtacaattcactttgaaggcgaactggtgaatgctgcctgtagtgtgaatactgacagcgcagaccaggttgtcacactcggtcaatatcgtaccgatattttcaatgctgttggtaatacctctgcattaattccattcaccattcagttgaacgactgcgatcctgttgttgccgctaatgctgccgttgcattttctggtcaggctgatgcaatcaatgataatttattggccattgcatccagtaccaatacaacaacagcaacgggtgtcggtattgaaatacttgataatacatccgcaattctcaaacctgatgggaatagcttcagtaccaaccagaacttgatccccgggaccaacgttcttcatttttctgcacgttataaaggcaccggtacaagtgcaagtgcagggcaagcaaatgctgacgcgacttttattatgagatatgaataatcaaaaccacgttgttttgaattatatatcacgtcttataacaaagtaatgtaccggttgtctgaagcggtatggtggcaatgtaaatcgaaatcatgttcactttgtatcatgccgctttattaaatgaaaagggaatgatgtgttgtaagaaaccaaagcaatcatttctttatattccttatttttgccgtcaggaatacacaaggcgtattaactatgatgactaaaataaagttattgatgctcattatattttatttaatcattagcgccagcgcccatgctgccggagggatcgcattaggtgccacgcgtattatttatcccgctgatgctaaacagactgcggtatggattagaaatagccataccaatgagcgctttctggtcaatagctggattgaaaacagcagcggtgtaaaagaaaagagtttcatcattacaccgccactgtttgttagtgaacccaaaagcgaaaatactttgcgtattatttacaccggtccaccgctggcagcagatcgtgagtctctgttctggatgaatgttaagacgatccctagcgtagataaaaatgcattgaacggcaggaatgttttgcaactggcgattttaagccgcatgaaattatttctccgtccaattcaattacaagaattacccgcagaagcgccggacacactcaagtttagccgatccggtaactatatcaatgttcataatccaagtcctttttatgtcaccctggttaacttacaagtgggcagccaaaagttggggaatgctatggctgcacccagagttaatagtcaaattcccttacccagtggagtgcagggaaagctgaaatttcagaccgttaatgattatggtagtgtaactccggtcagagaagtgaacttaaactaaccgaatcatctgacaatatcagagctaattatgaaaatacccactactacggatattccgcagaggtatacctggtgtctggccggaatttgttatagttctcttgccattttaccctcctttttaagctatgcggaaagttatttcaacccggcatttttattagagaatggcacatccgttgctgatttaagccgctttgagagaggtaatcatcaacctgcgggcgtgtatcgggtggatctctggcgtaatgatgagttcattggtagccaggatatcgtatttgaaagcacaacagaaaatacaggtgataaaagtggtgggttaatgccctgttttaaccaggtacttcttgaacgaattggccttaatagcagtgcatttcccgagttagcccagcagcaaaacaataaatgcatcaatttactgaaagctgtacctgatgccacaattaactttgattttgcagcgatgcgcctgaacatcactattcctcagatagcgttgttgagtagcgctcacggttacattccgcctgaagagtgggatgaaggtattcctgctttactcctgaattataatttcaccggtaacagaggtaatggtaacgatagctatttttttagtgagctcagcgggattaatattggcccgtggcgtttacgcaacaatggttcctggaactattttcgcggaaatggatatcatagtgaacagtggaataatattggcacctgggtacagcgcgccattattccgctgaaaagtgaactggtaatgggagacggcaatacaggaagtgatattttcgatggcgttggatttcgtggtgtacggctttattcttctgataatatgtatcctgatagccagcaagggtttgccccaacggtacgtgggattgcccgtacggcggcccagctaacgattcggcaaaatggttttattatctatcaaagctatgtttcccccggcgcttttgaaattacagatttgcacccgacatctagtaatggcgatctggacgtcaccatcgacgagcgcgatggcaatcagcagaattacacaattccgtatagtacagtgccaattttacaacgcgaagggcgtttcaaatttgacctgacggcgggcgattttcgtagcggtaatagtcagcaaagtagccctttcttttttcagggtacggcactcggcggtttaccacaggaatttactgcctacggcgggacgcaattatctgccaattacaccgcctttttattagggctggggcgcaatctcgggaactggggcgcagtgagcctggatgtaacgcatgcgcgcagtcagttagccgacgccagtcgtcatgagggggattctattcgcttcctctatgcgaaaagcatgaacaccttcggcaccaattttcagttaatgggttaccgctatagcacacaaggtttttatacccttgatgatgttgcgtatcgtcgaatggaggggtacgaatatgattacgacggtgagcatcgcgatgaaccgataatcgtgaattaccacaatttacgctttagccgtaaagaccgtttgcagttaaatgttagtcaaagtcttaatgactttggcagcctttatatttctggtacccatcaaaaatactggaatactagcgatagtgatacgtggtatcaggtggggtataccagcagctgggttggcatcagttatagcctcagttttagctggaatgaatctgtagggatccccgataacgaacgtattgtcggacttaatgttagtgtgcctttcaatgttttgaccaaacgtcgctacacccgggaaaatgcgctcgaccgcgcttatgcctcctttaacgccaaccgtaacagcaacgggcaaaatagctggctggcaggtgtaggtgggaccttactggaaggccacaacctgagttatcacgtaagccagggtgataccagcaataatgggtacacgggcagcgccacggcaaactggcaggccgcttacggtacgctggggggcgggtataactacgaccgcgatcaacatgacgttaactggcagctgtctggcggtgtggtcgggcatgaaaatggcataacgctgagccagcctttaggggataccaatgttttgattaaagcgcctggcgcaggcggtgtacgcattgaaaatcaaactggcattttaaccgactggcgcggctatgcggtgatgctgtatgccacggtttatcggtataaccgtatcgcgcttgataccaatacgatggggaattccatcgatgttgaaaaaaatattagcagcgttgtgccgacgcaaggcgcgttggttcgtgccaattttgatacccgcataggcgtgcgggcgctcattaccgttacccagggcggaaaaccggtgccgtttggaagtctggtacgggaaaacagtaccggaataaccagtatggtgggtgatgacgggcaagtttatttaagtggtgcgccattgtctggtgaattactggttcagtggggagacggcgcgaacagtcgctgcattgcgcactatgtattgccgaagcaaagcttacagcaagccgtcactgttattagcgcagtttgcacacatcctggcagttaaaggaaattatcaataagataatctgcagattattattggcgatggcatgtttgtgtctggcaaacatatcctgggctactgtttgtgcaaatagtactggcgtagcagaagatgaacactatgatctcagtaatatctttaatagcaccaataaccagccagggcagattgttgttttaccggaaaaatccggctgggtaggtgtcagtgcaatttgtccacccggtacgctggtgaattatacataccgtagttatgtcaccaactttattgttcaggaaactatcgataattataaatatatgcaattacatgattatctattaggtgcgatgagtctggttgatagtgtgatggatattcagttccccccgcaaaattatattcggatgggaacagatcctaacgttagccaaaaccttccattcggggtgatggattctcgtttaatatttcgtttaaaggttattcgtccctttattaacatggtggagatccccagacaggtgatgtttaccgtgtatgtgacaagtacgccttacgatccgttggttacacctgtttataccattagttttggtggccgggttgaagtaccgcaaaactgcgaattaaatgccgggcagattgttgaatttgattttggtgatatcggcgcaagcttatttagtgcggcagggccgggtaatcgacctgctggtgtcatgccgcaaaccaagagcattgcggtcaaatgtacgaatgttgctgcgcaggcttatttaacaatgcgtctggaagccagtgccgtttctggtcaggcgatggtgagcgacaatcaggatttaggttttattgtcgccgatcagaacgatacgccgatcacgcctaacgatctcaatagcgttattcctttccgtctggatgcagctgcggcagccaatgtcacacttcgcgcctggcctatcagtattaccggtcaaaaaccgaccgaagggccgtttagcgcgctggggtatttacgcgtcgattatcaatgaggtacggagaatgagaagagtactctttagctgtttctgcgggctactgtggagttccagtggatgggcagttgaccctttaggaacgattaatatcaatttgcacggtaacgttgttgatttctcctgtaccgtaaacacagcggatattgataagacggtagatttaggcagatggcctacgatacaactactgaacgctggcgataccacggcactcgtcccttttagcctgcggctggagggatgtcctccgggtagtgttgcgattttatttacgggaacgccggcatccgataccaacctgctggctctggatgatcccgcaatggcacaaaccgtcgccatcgaattacgtaatagcgatcgctcccggctcgcactgggggaggcgagcccgactgaggaagtagatgcaaatggcaatgtcacactaaacttttttgccaattatcgagcgttagccagcggtgttcggccaggtgtggcgaaagcggatgcgatatttatgatcaattataattaatattatattaattcgtataatttggcgtagtcgataagctctacaatactatgcaaacctagcttgccataaatattagatttatgcgcactaactgttttattgctaagtaataacttatcggcaatttctttattagataatccgctaaccagataacgtaatatggtcacttcacgattagatagcacagtgaccgtactactattcgtactacatttattgctttttatatagttaagcgtttcgctgggaaaaaacgtgtatccggagaggatcatctgaacggcatgaaaaatatcattctgatcattgcatttactgacaaaaccgttagcaccagcttgtatcgctctgccagcataaaagcattcacttttgctacttaaaaataacactttcactgtgctctggatttgtttgatccttttcaggaaggtaaaaccgtctgttccgggcaagtctatatccataatgattaaatcaacaggacgggttcggagataatcgatggttatgcgataatcatccgttttcaggacaatctgcaattcactgtttttttgcaacagaacttcaatagacattctgatgataggatgagtatccataatgatcacgctcgttggtttcatagttaccagtctcataggagcggacaattttccgttaggtcgggaaattgtactttgatacatgaaaatacgggttttcttgattcagacgcgcagcggtgtgcgtttgtttgccgctatagcgaaataaatcagaaaatcagacgcggtcgttcacttgttcagcaaccagatcaaaagccattgactcagcaagggttgaccgtataattcacgcgattacaccgcattgcggtatcaacgcgcccttagctcagttggatagagcaacgaccttctaagtcgtgggccgcaggttcgaatcctgcagggcgcgccattacaattcaatcagttacgccttctttatatcctccataatttcagagtgggacatatttgggacattatcaccaaaaatgtcgtctattttcctcgcatgctctgtcaaatgattaggcgcaaggtgagcatacctacgaaccatttctatggactcccatccgcccatttcctgaagcactgataatgggacgcctgactgaatcagccagcttgcccaggtgtgtctgaggtcatggaaacggaaatcttcctcatttatgcccgtcttatccgtttccgctttgcccttcaccacatcactttttgtcgctgtttggcgagataattcaacggtgtcaggccgtaaaacgccttaaaaacagagataaagtagctcgtgctgctatagccacataattgcgccacctgagtgatatttttgttatccatcaataacatctgtacggcgtaacgcatacgacactctgtgacaatctggctatagctggtattttcgttttttaatttctttttgagcaggctggggcttaaacataggctactggcgacaattcgcagattccagtaatgctgaatatcgctttgaataatgcggcagacgctgtcgcggacgctgctgcgtaagatatacatcagtagggcaataaaccggctttgctcaagaaagttagacaatacggtaaaaagcaatgcgcgcgtcaactccgcttcgcagggtctgctgggttgctgcttgctgtggttggcggctagccggaacacttccggtgtacggctatgacaagcgataaccggggttgccagccggctccagggctttacacaggttaagttcttatttaaaaacaacagataatcgttgatgatgttacggttgatgtgggtgattaatacgtgatttaacgtactgagttcaatgacgttattgttgcacgcgaaggcggccaggtagtttttcggaagggtaaacgtagcatggttattgacgcttacctctacctctttttcggtcaggatcaccacgcaaggttcactgctgctcaattgcatttcgcactcctcagatatcagaaactccgctcaaaggatctatgcttcctgcatgagtgatcggcccgttcgccgataacgatcttctttctttagcacgctttttagcaattaatcttgatggaattctgatgagagcgaaagaggtaagccaggtcgtacccgacttacctggaggagatttaatactcgagaatgccgtgcgcgacgggcaaatagcgcagagagaaatagagagtgtctttaccgcaagaggaacgtttcgctaacaggctggcaatttctgcgtccggtttcggtttcgctgtaaaggttttgcctttgccggcgacaaaaagttcataaacaacgccgctggcaggggcgggactttggcaatcggcgctggcctgtaaataacgttcacgctgttcagcggtcagtttatccacgccgctgccatcctgtacccagacattaacgccggttgctttaacgtgttccagcagttggcgatagccatcggggctcatgtttccggcgaaaaaactactgatataaaccggttttgcactaacatcgctaatcagccgctgcgcgttgtttaaccatgttagcaaaggctgacgggcggcttcgctgcgccagttcaggtcgtcaatttccgcgctgatgtaccagccatccggcgttatgccaggcgcggcgctccataatctggcttgctggagatcggcagccagcaggcgattaagatagctttccagcgctgcggagctctgtttctggtgcataaaaaattccggatcggcgttcagcccgacaataagcttcagaccagcctgttgcgcagctgcggcccgcttaaacaataacgtgcgctgttctggctgggtaaatgcatcgccgtaacgggtccattgcaaaacaagggtatcgaagccttgcaaacgtaactgactcatcagcccctgccactgggtatcggtaacctgactatctcggttttgtggttgccagataatacctttcatcgcaaaggaaaaagggctgaccaaaagcagtgtcagcaatacgaaaatgaacttacgcatttaccagtgcactccaatggtgagaaacgcgttgttgcgctctccgttacgttgattaatcgccttaaaggtatgttgatactcgacgccgagactgactttgtgcggccaggcgtcgtagtgcgtctcgccggtccagatattccagcggaccccgactccgccaagctgcgcgccctgagtgcctttatcacgatagccgttgtcctgaacgtgagcgtaaggctcaatagtctgtccgttagctaccttctgatgccagctgacgcgataatctgccgtccacgcctgaatatcctggcggatatattgcgccgcatcgaggtacaggttttgggcaaaccagccactaccgttcgggtgccattcgtcgctgtatttgccgccattaaagaaactggcgctggcgcgcagcatggtatcggatgcgccattttggccgttcagcggcaactgctgttcgacggcgatgaaaaagatctgatcgcgcagcggcttccagcgcagaccggtgccggacatcggatttttcaccggcatcatcaccccgttttctccggtatcggcaaagacgcggctataaacactgagcaggtcgccttccagcagcatattgcgtccgatgcggtactcggcttccagttgtccgtagctacgatagcttttccctggcgctgcgccgccgacattattgttagcggtactcattgcgccggaacgcaagccgatggaagaatcgaaactgaacgtccagcggcgaccgacctcctcatgcaaacggcggaaattgaagcgttgttgattttgttctggggtcagtggggttatcagcgcctgattatcaatgtcatcaatcaccagccgggcgtagtgctgcgtcgcaggcatgtcatccagacgctggttcacgtaggccagttgtcggatcagtgccggatcgtccggaagccctttatgcgccggttcgagcatttcccggctctgtgcgatatcaccgctatcccacaaggcgtaaccaagcgctgcctgggtgttgctattattcggttccagttccagcgcggcgcgcaaatcactcaccgcggccgggacattatgacgttggcgataaattgtcgcccgcgcaacgtaagcgttggcagaaggcgcaatattgatactgcgcgtgagatcgttcagtgcgagttccggctgaccaggaatgtaacgttgcgcatgcagccaccagtagagggcattgcttcccagtccacgtttttctgcctgttgtagccagcgatcgcgagccgcaccatttcctgccgcctgggcggtattggcagcagcaagcagatcctcattgctcatgtcgtgaagactgattttctgccaggccgccagtgcggtggcgtagtcctcaacctgatacgcctgataggctaccgcacgatgttgccaggcgctcggttgtcgttgttcggcctgaagccatgcatacaacgccacaccgggtagcgtgtcccgataacactttgccagacggttccaggcggcggcatcgtaggaagggctcatatcgcccagcaagcgaactattgccgggcaattatctgcaatacccggcaactgactttgccactgacgttgctccgccagcggtaagggtttgcttaaaatcgccaccttcgccggcgttgccaggtaaggatgactttccagcagagacgccagtcgcgccattaaagtctggctgacacgcgcatcgccctggaaaggatagcgttgcagcaataaatcggcagcttcgcgactctgctcgttctgcatcagttgccaggttagttgatccaggcgggtaagatttgccggttcttgctgatacagcaatcgtgccagacgcagagcttcagccttgttacgggtcgccacgctgacagcataacgctcctcaagcatttcattggcggggagggtggcgagcagtttttgcgctgcgtcgtactgaccttcttttaacagcaccggtagcgtcgcgccaacaacatactggcggttgtcggcaaactgtaccgtataattcgccaacgcctgaacggggttagcgctgtatttagataacagatagagccaacttttctcttgtgcgtccgtggtaaatagtggcttattttcaatgagataatgctggaggcgtgctttttcgccacgataagccagcgcggtcgcgtaagtaatataactctgaggatcggtgaagatcccctgactttgcagtgccaggatccgatcgtccagctgcccggcaagaagcacgtcaaaccactgacggcgttctgccgcgcttaatgtgttctgctggcgtgcttcattgtatagcgtatctgcctgggaccattgtttcaggtagattgcccgttgcagcagatcggttcgcagcgtttttccttccgggcttgcagcaaacgtcgcatcgttcagttgcgctctggcgacaggtaactgtgccagccgcagggcattctgcccgacttcactgcgacaacgcagggtcggcgcagcatcgcacgctttttgctgggcaagcagttcttcaactgtcgtaacgcttttcacttcaaccggaatagccgccagactgcgctcaagtcgggcatctcctgggtgacgtttcagttgatcctcaagcaacagccgcgcccggtcatcatgaccaaaatggcgataggcttccgcaaggtataaagtcagcggaatattatccggcacctgctggtgtatatattcaaattcgcggatggcggttgcttcgtcgttatttttctgtgccttcagcgctttatcgagacggggataaataacaaaatggcgataatcgctcagccccagctcttctgcgctggtgccgatattgtctgcgagtgcgctggtactcaataaagacgtcagcagtaaaccagaccatccgatgacgcgattaaggttattctccttcattttcggactccagttgcgcaacctgttctgtgtttaaacctgctttgagtaatagactttgcatgctaacttgtaattcgcgttgaattgtcaggacgcgatccaacgtttcctggctgataacgccttcggtgaccaaaaacttgccgagcggcagagaactgcgttcatggcgcaataacaacacgttaattgcactacgattaatatgaccgagcgtggtcagtatttcggcgaacaggaactgatgcggcacatattgccgccagatttcaccggcctgctgttccgtgagccactgatgctgaaccgcattgtacaacattgcccgcggatcgtgaccgcgtcggcgtgcataccagtgacgtaaccctgtgacaatttgtccccgcagaacaatgacgtaacgcactttgcgtccgactttacgcgtcagggccgccaggctaaccgggtcaataccatcttcactgccgacaattaactcgtcattttccagacgcagcggcagtaccgcataatgcagcgccacggaggccggcatttcggcaatcaggctggaagggatctgccaggcatcgatggattcccacgccacgccgttttgctctgccagcgcctgtgccagctgctcggcgctaatcagcccctgcatcagcatactaccgcccaggcgtagaccttcgacgcgattacgcagtgctgtatcgagttgttcttcagtgatgacctgattttccagcagaatttgacctaacgggcgcaagctgcgggtatcgccagtcacgctggggaagtcatgcgttgttttatcccacgccacgcgacgtggatcgccgtgttgaagtacctgttttagcgcgcgccagttggccatgaagttaatcaggttgccccagaaaagacgcaggacggaaagcagcccctgcgtcaggccgtagtagccagtaacgaaaatcacccgctgcacgatgcggttaaccatcaaaccaaagtttagccacagcagggtcattaaccatgcgctgccgctgaaaatagaaaggaaatgccaggcatcgggccacaaactttcatacgccagcaacagcaaaagctggatcatcaccagcatcgcgaggaagctgacaaagttactgattgcccctttgcggtcgcgccagagaaagtagttcagcgtcaggctggaggtccatttatgggttttaaagccttggaaaacaatgccgatgatccagcgggatttttgtcgaaccgcagtgctaaaggtatcggggaaatattcgcgcacgcagatcatgttacttgtccgcgcgtgctgtaaaaatttacgctgctcgcgttctttggcttcgtccaccaccggaaaacggacaaaaatttccgtcatacctttttctttcaggcggaagccaatgtcgtaatcttcagtaagactctgcacgtcgaaagcaataccgtcaccgtcagctaacagtgcggtcacggcgcggcggctgaaacaggtgccgacgcctgcgctgggcacttgtccggcgagggcttcacgcaccggaacatctttgccatgcagctcactaaactcatcaatgtaagtcatgctggtgaagtgcgtccattcgcgttcgaacggatacaccgggatctgaatcagatctttacgctcgaccagatagttgaacagacgcaattccatcggactaatcacatcttcggcgtcatgcagaataaaaccagcaaaagcgaaattggcgctacgctcaaattgggtgatggcgtccagcacgttgttcagacagtcggctttgctggtggggccaggacgcgcgcagactaccttatgcacattcgggaagcgagcgcacacttcgtcaacatcacgctgagtatcggggtcgttggggtaggtgccaacaaagatatgatagttttcgtagtcgagcgtggtcgccgccagctcggccatattgccgatgacgcccgtttcattccacgccggaaccataatcgctaacggtttttcatctggtttatacagttcgcggtaactcattcgcgggtagcggcgataaacactcaacttgcgtttaatgcggcgtacccagtagacgacatcaataaaaaaatcgtccagcccgctgatgaacatgatgaccgctaacgttatcgcgattacttttaagccgtagagccaggtagcaaaaacatcaagaagccagtccacacaaaaaccttacattaacgctggttatgtttagggtggcgtatattaaggttttttatgaattgtgacagctttttaccattaataggtatgactattgcggcacgttatttttacactggttataaaagttgccgtttgctgaaggattaagcgggtaatgtgataacaaaccttgtcccccgcgcatcgctcgttaccgcaaccgtgcctttatgcgcgacaacaatgcttttcactatcgccaggccaataccgctaccttcaccttttcgctggcgggaggggtcaacgcgatagaaacggtcaaacaatcgcggtaagtgctcgggcgcaatgggcgtaccggggttttcgacgataacttgcaccaggtgatcgaccgtctgacagcgcactacaattgtctctccggttggcgtataacgcagggcgttgctaagcaggttgcttagcgcccgacgcagcatcagcggatcgcccgcgacctgacacttgtcgccaacaaaccgcaactccacgccgcgatcttccgctaacgcctcgaaaaaatcgaacactttgccgacttcatccgccaggttgagcattttcttttcggggattagctggttgttatcggcctgagcgagaaacagcatatcgctgaccattttcgccattcgcgtcagctcttcgagattagagtagagcacatcttccagctccttctggctgcggctctggctgagggcgatttcggtttgcgttatgagattcgtaattggtgtgcgaatttcgtgagcgatatccgcactgaaattggactggcgggtaaagacatcctcaatacgctcgatcatatggttgaagctcagtaccagctgttccagctcaatgggcacggtctgcgggtcgaggcgaacgtcgagatctttgctggtaatattctggatttgacggctgacgctgcggatcggcgcgtgacctttatgtaccgccaacagtacgataaagacgatcaggatgctgattacgcttgcggtcataataagtttattcatcaaatcatttatgtaatgaagatgaaaatcgatgctaagcgcgatgtagagcgtataaatcggtttgccgtccaccaacgggccaaccggcaagttaatcatccgccagttgctgtgttccatatgcccgtgaccgtggcctggcatcatcatcgtcgggccggaaaggagatacacctcgccaccctgagcgtctttatcgggtatggcgtcacgcgtaaactcgcggatatccggcgcaccgggggagtgatacaccgttttaccctgactatctgccagggaaatcaacacattggaataaccactgacgatatcttccagcgtcattaagcgtcgggcttgcgtttcgtcagggtgatttagtacccgttcaagggtggcgctaatctcttttaaatcattaatatcctgctcggcaaaatgaacttttacactgtggatcatgatccatgcaaaggcgaaaaacgccgcgatggtggccaggctgataaaaaaggtcaggcgggttgccaggctaaacgggcgctgaaatggcttactgaccatccggcacctcaagcatgtaacccacgccgcgcacggtctgaattagcttcggctcaaagtcgttgtcgattttgccgcgcagccgcttcaccgccacatcaatagcattggtatcgctgtcaaaattcatgtcccatacctggctggcgataaggctgcggggcagcacttcgccctgatggcgaaggaagaactccagcagagtaaactctttactggtcaaagtgatgcgcgtgccgctgcgggtgactttgcggctgacgagatcgaccatcaaatcggcaacctgaaactgactttcgataatcaccgccgccccgcgccgcagtaatgtgcgcacccgcgccagcagttcagcaaaagcgaatggcttcaccaggtagtcatctgcccccaactccagccccttgacgcgatgttcaatggtgccaagcgcggtaagcaacagaatcggcatccctttattggcggagcgtaacatgcgcacgatatcccagccgttcacgtccggcagcataatatcgaggattatcagatcataatcaccggtcatcgccagatggtagccattcagcccgttgtcggccaaatcgaccacaaaaccggcttcggttaaccctttggtcaagtattctccggttttcttttcatcttcgacaatcaacagtttcatatttcctccgcatgttgcccgggcaattctagagtagcgggatcagatggcaatcgcttattggcaaaatgacaattttgtcatttttctgtcaccggaaaatcagagcctggcgagtaaagttggcggcataaaatcaccagaaattatgagcctatgtctccttgtaaacttctgccattttgtgtggcccttgcgctaaccggttgtagtctggcaccggattatcagcgtccggcaatgcccgtgccgcagcagttcagtctcagccagaacggcctggttaacgcagcagataactatcagaacgcgggctggcgcaccttttttgttgataatcaggtgaagacgctgattagcgaggcgctggtgaataatcgggatttgcgcatggcgacgctgaaagtgcaggaggcacgggcgcaatatcgtctgaccgatgccgaccgctacccacagctcaatggcgagggcagcggcagctggagcggtaatcttaaagggaataccgccacgacacgggagtttagcaccggccttaacgccagctttgacctcgattttttcggtcgcttaaagaacatgagcgaagccgagcgacaaaattatttagccactgaggaagctcagcgcgcggtgcatattctgctggtttctaatgtcgcgcaaagctatttcaatcagcaactggcgtatgcgcaattgcaaatagccgaagaaacgctgcgtaattatcagcagagttatgcgtttgtcgaaaaacaactgttgacaggtagcagtaatgttctggcgctggaacaggctcgcggggtgatagaaagtacccgcagcgacatcgctaaacgtcagggggaactggcgcaggcgaataatgcattgcaactgttgctgggaagctacggcaagctgccgcaagcgcagacagtaaacagcgacagcctgcaaagcgttaaattaccggcgggattgagcagccaaatcttattgcagcgcccggatattatggaagctgaacacgcgttaatggcggctaatgccaatattggcgctgcacgcgcggcattttttccgtctataagcctgaccagcggaataagcaccgccagtagcgatctaagcagtttatttaacgccagcagcgggatgtggaattttatacccaaaattgagatccccatttttaatgccggacgcaaccaggccaatctggatatcgccgaaattcgccagcagcagagcgtggtgaattatgaacagaaaatccagaacgcctttaaagaagtggcagatgcgctggcattacgtcaaagcctgaacgatcaaattagcgcccagcagcgttatctggcaagcctgcaaattactttgcaacgggcgcgggcattatatcagcacggcgcagtaagttatctggaagtgctggatgccgagcgttctttatttgcaacccgacaaactttacttgatctgaattatgcccgtcaggttaacgaaatttctttgtataccgcacttggtggcggttgacagcaatatactcgtcatacttcaagttgcatgtgctgcgtctgcgttcgctcaccccagtcacttacttatgtaagctcctggggattcactcgcttgtcgccttcctgcaactcgaattatttagagtatgacttttaactccaggagagaataaatgaaaaaagcactgcaagtcgcaatgttcagtctgtttaccgttattggctttaatgcccaggctaacgaacatcatcatgaaaccatgagcgaagcacaaccacaggttattagcgccactggcgtggtaaagggtatcgatctggaaagcaaaaaaatcaccatccatcacgatccgattgctgccgtgaactggccggagatgaccatgcgctttaccatcaccccgcagacgaaaatgagtgaaattaaaaccggcgacaaagtggcgtttaattttgtccagcagggcaacctttctttattacaggatattaaagtcagccagtaacccaggtttaatgagatgaaaaaaatcgcgcttattatcggcagcatgatcgcgggcggtattatttctgcggcaggttttacctgggttgcaaaggcggaaccgcctgcagaaaaaacgagcaccgcagaacgtaaaatcttattctggtacgacccaatgtatcccaatacgcggttcgataaaccaggtaaaagcccgtttatggatatggatctggtgccgaaatatgccgatgaagagagttctgcgtctggtgtgcgcattgacccgactcagacgcagaatctgggggtgaaaacggctaccgtcacgcgcggaccgctgacttttgcccagagtttcccggcgaatgtcagttacaacgagtatcagtatgccattgtgcaggctcgcgctgccgggtttatcgacaaggtgtatccgcttaccgtgggcgataaagtacaaaagggcacaccgcttctcgacctgaccattcctgactgggtggaagcgcagagtgagtatttactgctgcgcgaaaccggcggtacggcgacccagactgaaggcattcttgagcggctgcgactggcgggaatgccggaggcggatattcgccgcctgatcgccacgcaaaaaatccagactcgctttacgctcaaagcgcccattgatggcgtgatcaccgcgtttgatctgcgcgcgggaatgaatatcgccaaagataacgtggtagcgaaaattcagggtatggacccggtgtgggtcactgctgcgatcccggagtctatcgcctggctggtgaaagatgccagccagtttaccctcaccgttccggcgcgaccggataaaacactcaccatccgcaaatggacgctgctacctggcgtggatgccgcgacccgcacgctgcagctgcgtctggaagtcgacaacgccgacgaggcgctaaaaccgggcatgaacgcctggttgcaactcaacaccgccagcgaaccgatgctgctcattccgagtcaagcgctgattgataccggcagcgaacagcgggtgattaccgttgatgccgacgggcgctttgtaccgaaacgcgttgctgttttccaggcaagccaaggcgtcaccgcattacgctctggtctggcggaaggtgaaaaggtggtttccagcggcctgttcctgattgattccgaagccaatatttctggcgcactggagcggatgcgctctgaaagtgcgacccatgcgcattgagggaataaccaatgattgaatggattattcgtcgcagcgtggcgaaccgttttttggtgctgatgggcgcgttgtttctgagcatctggggcacctggaccatcattaatacgccagtggatgcgctgccggatctctccgatgtgcaggttattattaaaaccagctatcccggtcaggcaccacaaatcgttgaaaatcaggtgacttatccgctaaccaccaccatgttgagcgtgcctggcgcgaagactgtgcgcggtttcagtcagtttggcgactcttatgtgtatgtcattttcgaagatggcaccgatccgtactgggcgcgtagccgggtgctggagtacctcaaccaggtacagggtaagctgcctgcgggagtcagcgccgagctggggccagatgccacgggtgttggctggatctatgaatatgcactggtggatcgcagcggtaagcacgatctggccgatttacgcagtttacaggactggtttctcaaatatgagctgaaaaccatccctgacgttgcggaagtggcgagcgtgggcggtgtggtgaaagagtatcaggtggttatcgatccccagcgcctggcgcagtatggcatcagtctcgccgaagtaaaaagcgcgctggatgctagtaaccaggaagcgggcggtagcagcatcgaactggcggaagcggaatatatggtgcgcgccagcggctatctgcaaacgctcgacgactttaatcacatcgttttaaaagccagtgaaaatggcgtgcccgtttatctgcgcgatgttgcgaaggtccagattggcccggagatgcgccggggcattgccgaactaaacggcgaaggcgaagtggcgggcggggtggtgatcctgcgatccggcaaaaacgcccgagaagtgatcgccgccgtgaaggacaaactggaaacgctgaaaagtagtctgccggaaggcgtggagatagttacaacatacgatcgcagccagctcattgaccgcgccatcgacaacctcagcggcaagttgctggaagagtttattgtggtggcggtagtctgtgcgctgtttctctggcatgtgcgcagcgcgctggtggcgattattagcttgccgctggggttgtgtattgcttttattgtcatgcacttccagggactgaatgccaatattatgagcttgggtggcattgcgattgccgtcggggcgatggtcgatgctgctatcgtcatgatcgagaatgcgcataaacggctggaagagtggcagcaccagcatcctgacgccacgctggataataaaacgcgctggcaggtgatcaccgatgcgtctgttgaagtggggccggcgctatttatcagtctgctgattatcacgttgagctttatcccgatcttcaccctggaagggcaggaagggcgtctgtttggcccgttggcgttcaccaaaacgtatgcgatggcgggtgcggcgctgctggcgatcgtagtgatcccgatcctgatgggctactggatccgtggcaaaattccgccggaaagcagtaacccgctcaatcgctttttgattcgtgtttatcatccgctgttgctgaaagtactgcactggccgaaaaccacgctgctggtggcggcgcttagcgtgctgacggttctctggccgctcaataaagttggcggggaatttttaccgcagatcaatgaaggcgacttgttgtatatgccaagcacgctgccggggatttccgcagcagaggcggcgagtatgctgcaaaaaaccgacaagctaattatgagcgtacctgaagtggcgcgggtatttggcaaaaccgggaaagcggaaaccgccaccgattctgctccgctggagatggtagaaacgaccatccagcttaagccgcaggagcagtggcggccaggcatgacgatggacaaaatcattgaggaactggataacaccgtgcggctgccggggctggcgaatctgtgggtgccgccaattcgtaaccgtatcgatatgctcagtaccggcattaaaagccccatcggcattaaagtttccggcactgtgctggcggatatcgacgcgatggctgagcaaattgaagaagtagcgcgaacggtgccaggcgtagcttctgcgcttgccgagcggctggaaggtgggcgctatatcaacgttgagattaaccgtgaaaaagccgcacgttacggtatgacggtggcggatgtgcagttgtttgtgacttctgcggtgggcggggcgatggttggcgaaacggtggaagggattgcccgttatccaattaatctgcgttatccgcaaagctggcgcgatagtccgcaggcactgcgccagctgccgatcctgacgccgatgaagcagcaaatcaccctggcagacgtggccgacattaaagtctctaccggaccgagcatgctgaaaaccgagaatgcgcgcccgacgagctggatttatatcgatgcccgcgatcgtgacatggtgagcgtggttcacgatttgcaaaaagcgatagctgaaaaagtgcagttaaaaccgggcaccagcgtggcattctccgggcagttcgagctactggagcgcgccaaccataagcttaaactcatggtgccgatgacgttgatgattatcttcgtgctgttgtatctggcgttccgtcgggtgggcgaagcgttgctgattatcagcagcgtaccgtttgcgctggtgggcggcatctggttgctgtggtggatgggctttcatctttccgtggcgacgggcactggctttatcgccctcgccggggtcgccgccgaatttggcgtggtgatgctgatgtatttacgtcacgccatagaggccgtgccgagcttgaataatccacaaacattcagcgagcagaagctggatgaggcgttatatcacggcgcggtcctgcgcgtgcgcccgaaagcgatgacggtggcggtgattatcgccggtctgctgccgattctgtggggaacgggggctggtagtgaggtgatgagccggattgccgcgccgatgattggcggcatgatcaccgcacctttgctgagcctgtttattatcccggcggcgtataagctgatgtggctgcaccgacatcgggtacggaaataaaagcaggataccccgtttaaccgtgtggattgtgtcttgcgacgatgggcactaaatgttaaaaggtgcccctcaacaaaaaagacacacaggggaaaggcgtgaaaaacgcgagtaccgtaagcgaagatactgcgagcaatcaagagccgacgcttcatcgcggattacataaccgtcatattcaactgattgcgttgggtggcgcaattggtactggtctgtttcttggcattggcccggcgattcagatggcgggtccggctgtattgctgggctacggcgtcgccgggatcatcgctttcctgattatgcgccagcttggcgaaatggtggttgaggagccggtatccggtagttttgcccactttgcctataaatactggggaccgtttgcgggcttcctctctggctggaactactgggtaatgttcgtgctggtgggaatggcagagctgaccgctgcgggcatctatatgcagtactggttcccggatgttccaacgtggatttgggctgccgccttctttattatcatcaacgccgttaacctggtgaacgtgcgcttatatggcgaaaccgagttctggtttgcgttgattaaagtgctggcaatcatcggtatgatcggctttggcctgtggctgctgttttctggtcacggcggcgagaaagccagtatcgacaacctctggcgctacggtggtttcttcgccaccggctggaatgggctgattttgagcctggcggtaattatgttctccttcggcggtctggagctgattgggattactgccgctgaagcgcgcgatccggaaaaaagcattccaaaagcggtaaatcaggtggtgtatcgcatcctgctgttttacatcggtagtctggtggttttactggcgctctatccgtgggtggaagtgaaatccaacagtagcccgtttgtgatgattttccataatctcgacagcaacgtggtagcttctgcgctgaacttcgtcattctggtagcaagcctgagtgtgtataacagcggggtttactctaacagccgcatgctgtttggcctttctgtgcagggtaatgcgccgaagtttttgactcgcgtcagccgtcgcggtgtgccgattaacagcctgatgctttccggagcgatcactagcctggtggtgttaatcaactatctgctgccgcaaaaagcgtttggtctgctgatggcgctggtggtagcaacgctgctgttgaactggattatgatctgtctggcgcatctgcgttttcgtgcagcgatgcgacgtcaggggcgtgaaacacagtttaaggcgctgctctatccgttcggcaactatctctgcattgccttcctcggcatgattttgctgctgatgtgcacgatggatgatatgcgcttgagtgcgatcctgctgccggtgtggattgtattcctgtttatggcatttaaaacgctgcgtcggaaataaggcattcacgctacatccgacaaaacgatgtcaaccatccgaaaccgctctcatccattcgatgagagcggtttttttaattactgcttaaatgcacccgccagagagcgaatatcattgccggttggcgagtaatccccgcatatccggttgtcaggtcaggatggtaaggcacctgctttacactttcgcccgtggtcagtgatggctgcgggcgaatcgtaccagatgttgtcaattaatcgtgttggcacagcgttatgactatcttttcttttatctgccagtgcacagcaaacatctcattctcacgatgaatgatgacctgctgtttattccagctaattatctgatagtccagaaaacctgcatcagtttggatctcacttgccttaaatgcgctctctttggcggaaaatgccagtgtcagcgccagagaaaaggctaaaccgcagtctgcgagtcgctcgtgttccgctggtgtaataatgttgtctgtcaattctcttgcggtttgtacagaaaaaatttcttctatatcaatgccaatcggttgacgagataccacggctaatgccgtagtcccacagtggctaatactgccgtatacctccgcaggccagacaggttggcgtagctcgccgattgcgggcacacatttatagccatattcccgcaaagcataaacagcagcgatccgtccggctaaatgctctgttttacgtttacgtccagcgtgttgcagttgtgcgtagtgcggcagccagagtaaatcctgctcacaaaaattcgccggatcgaactcaacaaaatgcagcgtatgtccggcaaaggggagggaggtatgcgtagttttcatatcgaccatattcgagactgatgacaaacgcaaaactgcctgatgcgctacgcttatcaggcctacatggtcctgcaatatattgaattggcaagatttttgtaggccggataaggcgttcacgccgcatccggcatgaacgacgcgcactttgtcaacaatctgacgttagcatcagaagtgggtgtttacgctcatataccacgtacgtcccggctcgttataggtatacgccccggcaccggcgatatagttggcccctgccgaatcgcccgtggtctgggcattacccgcacgccacaaacgtttgtcgaacagattgtccacgccgccggtcagactgacattcttcgtcacatcccaggtcgcgctcaggccaacaatgctgtaaggactaatttctttggtttccggtccaaccgctggctgacctttatagttgtacttcttcggctgctgcttgccgtaccaggtgaaggtcgtttgcatgctcaaatcttcccgtgcctgccagctcagcgtactgttcaacgtatactccgggatgatgctcaaacggtcgcccgtggttttgttttcactcttcagcatataagtgatgttattggtccacatcaccgtttcgctaaccggtacgtttaagcttccttccagaccttcaaccaccgctttcggcacgttatcccactgatagagatcggtgccgactgcgttttgccctacagccacatagcccgcttcaatcttattgcgataatcgttacggaaccaggtgacgcccgccagccacccgtcgcgtttgaactccagaccaatctctttgttgatgctggtttctgctttcaggtcatcgttaccttgcagatagcagccgcccgcgctggcatagcaaccctgacctttactgtagagaatgtagttcgggttagtctggtacaggctcggcgctttataagcacgggcgatgcccattttcagcgtgaagtcatcgcctaaaccttggcttatgttcagcgccgggctccagttattgccgacaatactgtgatgatcgaaacgcagccccggcgttacgatggtgctgtcagtcagctccatgttgttttcggcaaacaggctgaaaatttctgctttactatacgggctacggtcggtggtactcacgccatcaatagcgccaccggtattcgttccggtcagtgcctgggtgttggaacttaagtccttcatccgttgctgattccactccgtacccagcgtcagcgtctggttaacgaggaaatcaatcggcaggttaacttcgctgtgcagcatcacgtcatcaagatcgatatcgacgaaatcctgtgtcgctttttcgttaaatttcccttcggtaccgcccgccagaccttccggaatacggctgttacgggtgtgttcgtactgcacccagttgctggtggtcacgccgttatcccagccaccgttccaggtcagcgcgtagttctggcgatacagacggttggtttcatcgccatatttgctgcgggtataggaatcggagttggtattctgggtgtcgcccgcatacaggttaccctggcggctgtaacctgcttccagttccaggctttgcaatggcgcgaaatcccagcgcaccacgccattaatatctttgttgattaccccttcgcgcccggctggtaacgtcgtggcatacgttccggcacgcgcggactgatggccctggttgatatcccacgcgtcagcctgggttttgtcgaggttgccatacaaacggaagctgaattcgtcgcccagcggaccggtcaggctaaagttagtgcgtttggtggcaccttcctctttatgttctggcgcattgaaatatgcgtcccaggagccgtgccactcgccgctgccttttttggtaatgatgttaaccacgccgcccgccgcgccgttgccataacgcgcagctgccggaccacgcagaacttcaatacgttcaatcatttcaggtggcacccaggaagtatcaccacgggtatcgcgctcgccacgccagccctgacgcacgctgttacggctgcttaccggcttgccgtcaatcaaaatcagcgtgttttccggacccataccgcgaatatcaatctgtcggttattcccacgctgaccactggtggagttaccggtcaggttaacgcctggcatggtacggatgatcttgctcacatcgcgggcaaccgggtttttgcggatttcatctgcggtgatggtgctaacgccaggcgcctgtaagttctgctcggcggcggtaacgacaatagtatcgtcatgactaacaggagtatcggtcggctcttgtgcctgcgctaccccataaatccccagattgaccaacaaggccagggaatgaatcttcttgttcattgttttattcctgcatttttgccacgaattgcaactgtcgggcatggtcgtcatcaacacgacgcatcccgctaccgcgaaaacctttgatcctgaaagacacgcagtgcagttggttaattaatgtccgcgcttcccacggcgcgccattacgctattgcaaatgcaaatagttatcaataatattatcaatatatttctgcaatcaatgaaaaattgcacagtaaacatggggttatggtgtgacggcgttaaaagtaggaagtgagagctggtggcagtcgaaacatggcccggaatggcagcgtctgaatgacgaaatgtttgaggtcactttctggtggcgtgatccccaaggttctgaagaatacagcacgataaagcgcgtatgggtctacatcactggtgtgaccgatcaccatcagaacagccagccccagagcatgcagcgaattgcaggcactaacgtctggcagtggacgacacaactcaatgccaactggcgcggcagctactgctttattcccaccgaacgcgatgacattttttctgtaccatcccccgatcgcctcgaattgcgcgaaggctggcgaaaactattaccccaggcgatagccgatccgctgaacctacaaagctggaaaggcgggcgagggcacgctgtttctgcactcgaaatgccgcaagcgcctctgcaaccgggatgggattgtccgcaagcgccagaaatacctgccaaagaaattatctggaaaagtgaacggttgaaaaagagtcggcgtgtatggatttttaccaccggcgatgcaacagcagaagaacgcccgctggcagttttgctcgatggcgaattttgggcgcaaagtatgcccgtctggccagtgctgactagcctgacccatcgtcagcaacttcctcccgccgtgtatgtgttgatcgacgctatcgacaccacgcaccgcgcccacgaactgccgtgtaatgcggatttctggctcgcagtacagcaagagttattacccctggtgaaagctattgccccttttagcgatcgtgccgatcgcaccgtggttgccgggcagagttttggtgggctttccgcgctgtatgccggactgcactggcctgaacgctttggctgtgtattaagccagagtggaagctactggtggccgcatcggggcgggcagcaagagggcgtgttacttgaaaagctaaaagctggtgaagttagcgccgaaggtctgcgcattgtgctggaagcgggtattcgcgagccgatgatcatgcgggccaatcaggcgctgtatgcgcaattacaccccataaaagaatccattttctggcgtcaggttgacggcggacatgatgcgctttgttggcgcggtggcttgatgcaggggctaatcgacctctggcaaccacttttccatgacaggagttgaatatggcattcagtaatcccttcgatgatccgcagggagcgttttacatattgcgcaatgcgcaggggcaattcagtctgtggccgcaacaatgcgtcttaccggcaggctgggacattgtgtgtcagccgcagagtcaggcgtcctgccagcagtggctggaagcccactggcgtactctgacaccgacgaattttacccagttgcaggaggcacaatgagccagcatttacctttggtcgccgcacagcccggcatctggatggcagaaaaactgagtgaattaccctccgcctggagcgtggcgcattacgttgagttaaccggagaggttgatagcccattactggcccgcgcggtggttgccggactagcgcaagcagatacgctgcggatgcgttttacggaagataacggcgaagtctggcagtgggtcgatgatgcgctgacgttcgaactgccagaaattatcgacctacgaaccaacattgatccgcacggtactgcgcaggcattaatgcaggcggatttgcaacaagatctgcgcgtcgatagcggtaaaccactggtctttcatcagctgatacaggtggcggataaccgctggtactggtatcagcgttatcaccatttgctggtcgatggctttagtttcccggccattacccgccagatcgccaatatttactgcacatggctgcgtggcgaaccaacgcctgctagcccatttacgcctttcgctgatgtagtggaagagtaccagcaataccgcgaaagcgaagcctggcagcgtgatgcggcattctgggcagaacagcgtcgtcaactgccgccgcccgcgagtctttctccggcacctttaccggggcgcagcgccagcgcagatattctgcgcctgaaactggaatttaccgacggggaattccgccagctggctacgcaacttagtggtgtgcagcgtaccgatttagcccttgcgctggcagccttgtggctggggcgattgtgcaatcgtatggactacgccgccggatttatctttatgcgtcgactgggcagcgcggcgctgacggctaccggacccgtgctcaacgttttgccgttgggtattcacattgcggcgcaagaaacgctgccggaactggcaacccgactggcagcacaactgaaaaaaatgcgtcgtcatcaacgttacgatgccgaacaaattgtccgtgacagcgggcgagcggcaggtgatgaaccgctgtttggtccggtactcaatatcaaggtatttgattaccaactggatattcctgatgttcaggcgcaaacccataccctggcaaccggtccggttaatgaccttgaactggccctgttcccggatgtacacggtgatttgagtattgagatcctcgccaataaacagcgttacgatgagccaacgttaatccagcatgctgaacgcctgaaaatgctgattgcccagttcgccgcggatccggcgctgttgtgcggcgatgtcgatattatgctgccaggtgagtatgcgcagctggcgcagctcaacgccactcaggttgagattccagaaaccacgcttagcgcgctggtggcagaacaagcggcaaaaacaccggatgctccggcgctggcagatgcgcgttacctgttcagctatcgggaaatgcgcgagcaggtggtggcgctggcgaatctgctgcgtgagcgcggcgttaaaccaggggacagcgtggcggtggcactaccgcgcagcgtctttttgaccctggcactccatgcgatagttgaagctggagcggcctggctaccgctggataccggctatccggacgatcgcctgaaaatgatgctggaagatgcgcgtccgagcctgttaattaccaccgacgatcaactgccgcgctttagcgatgttcccaatttaacaagcctttgctataacgccccgcttacaccgcagggcagtgcgccgctgcaacttagtcaaccgcatcacacggcttatatcatctttacctctggctccaccggcaggccgaaaggggtaatggtcgggcagacggctatcgtcaaccgcctgctttggatgcaaaatcattatccgcttacaggcgaagatgtcgttgcccaaaaaacgccgtgcagttttgatgtcagcgtgtgggagtttttctggccgtttatcgcaggggcaaaactggtgatggctgaaccggaagcgcaccgcgacccgctcgctatgcagcaattctttgccgaatatggcgtaacgaccacgcactttgtgccgagcatgctggcggcatttgttgccagcctgacgccgcaaaccgctcgccagagttgcgcgacgttgaaacaggttttctgtagtggtgaggccttaccggctgatttatgccgcgaatggcaacagttaactggcgcgccgttgcataatctatatggcccgacggaagcggcggtagatgtcagctggtatccggcttttggcgaggaactggcacaggtgcgcggcagcagtgtgccgattggttatccggtatggaatacgggtctgcgtattcttgatgcgatgatgcatccggtgccgccgggtgtggcgggtgatctctatctcactggcattcaactggcgcagggctatctcggacgccccgatctgaccgccagccgctttattgccgatccttttgccccaggtgaacggatgtaccgtaccggagacgttgcccgctggctggataacggcgcggtggagtacctcgggcgcagtgatgatcagctaaaaattcgcgggcagcgtatcgaactgggcgaaatcgatcgcgtgatgcaggcgctgccggatgtcgaacaagccgttacccacgcctgtgtgattaaccaggcggctgccaccggtggtgatgcgcgtcaattggtgggctatctggtgagccaaagcggcctgccgttggataccagcgcattgcaggcgcagcttcgtgaaacattgccaccacatatggtaccggtggttctgctgcaacttccacagttaccacttagcgccaacggcaagctggatcgcaaagccttaccgttgcctgaactgaaggcacaagcgccagggcgtgcgccgaaagcgggcagtgaaacgattatcgccgcggcattcagcagcttgctggggtgtgacgtgcaggatgccgatgctgatttcttcgcgcttggcggtcatagcctactggcaatgaaactggcagcgcagttaagtcggcaggttgcccgccaggtgacgccggggcaagtgatggtcgcgagtactgtcgccaaactggcaacgattattgatgctgaagaagacagcacccggcgtatgggattcgaaaccattctgccgttgcgtgaaggtaatggcccgacgctgttttgtttccatcctgcgtccggttttgcctggcagttcagcgtgctcagccgttatctcgatccacaatggagcattatcggcattcagagtccgcgccccaatggccccatgcagacggcggcaaacctggatgaagtctgcgaagcgcatctggcaacgttacttgaacaacaaccgcatggcccttattacctgctggggtattcccttggcggtacgctggcgcagggtattgcggcgcgactgcgtgcccgtggcgaacaggtggcatttcttggcttgctggatacctggccgccagaaacgcaaaactggcaggaaaaagaagctaatggtctggacccggaagtgctggcggagattaaccgcgaacgcgaggccttcctggcagcacagcagggaagtactagtacggagttgtttaccaccattgaaggcaactacgctgatgctgtgcgcctgctgacgactgctcatagcgtaccgtttgacggtaaagcgacgctgtttgttgctgaacgcacacttcaggaaggtatgagtcccgaacgcgcctggagcccgtggatagcggagctggatatctatcgtcaggattgtgcgcatgtggatattatctctccagggacgtttgaaaaaattgggccgattattcgcgcaacgctaaacaggtaaattaatattatttataaacccataattacagaaaataattatgggttttttatttgtttgatttataggtttgatgaatatttctcttaaatagagtgaatgttgcattcagtggaaggaatttacaaacttcagcttcggataattatcaccaactggtaaagtgagcgccgtggagatttccccctattggactcattttcaggttataccccatgagtagtctgaatattaaacagggaagtgacgctcattttcccgattatcctctggcgagccccagtaataatgaaattgatttacttaatctaatcagtgttttatggcgggccaaaaaaacggtcatggcggtcgtttttgcgtttgcctgcgcaggcttgctgatctctttcatcctgccgcaaaaatggaccagcgcggcggttgtcacgcctccagaacctgttcagtggcaagagttggagaaaagtttcactaagcttcgtgtgctggatctggatatcaaaattgatcgtacagaagcatttaacctgtttatcaagaagtttcagagcgttagcttgctggaagagtacctgcgtagtagtccttatgtgatggaccaattaaaagaggcgaaaatcgacgaactggatttgcatcgcgcaattgtcgcattgagcgaaaaaatgaaagcggttgatgacaatgccagtaagaaaaaagatgaaccgagtctgtatacctcctggacgctaagttttaccgcgccaaccagtgaagaggcgcagaccgttttgagcgggtatatcgattatatctctacgttggtggtgaaagagagcctagaaaacgtccgtaataaactggagatcaaaacccagtttgaaaaagaaaaactggctcaggatcgcattaaaacgaaaaatcaacttgatgcaaacattcagcgcctcaattatagtctcgacattgccaacgcggcaggaattaaaaagcccgtttacagtaatggtcaggccgttaaagatgaccccgatttttctatttctctcggtgcagacggtattgaacgcaaactggaaatagaaaaagcggtcactgacgttgcggaactgaacggtgaattacgtaatcggcagtatcttgtcgagcaattaacaaaagcacatgtcaacgatgtgaattttacgccgtttaaatatcagttaagcccgagtttgccagtgaaaaaagacggtccgggtaaggcgattattgtgatcctttccgcgttgatcggcgggatggtggcttgtggtggcgtgctgttgcgctatgcgatggcatccagaaaacaggatgccatgatggcagaccacttagtttaactatttgcggtactaggtgccgttcgtccgagcggcaccacaagcggcgttccggcaactggatcgtcaatgatcatgcagcgcagaccataaatgcgctcaatcagttcagcagtgacaatctccttcggcgctccctgagcaacaattttcccttcccgcaatgcaatcaaatggctggcgtaacgacaggcctgattaagatcgtgcagcaccgccgccagggtatagcctttttcgcggttcagttcgcttaacaactccagcaaatcaatctgatgactgatatccagccaggtcgtgggttcgtcgagcagcataattgccgtttcctgggccagcaccatcgcgatccacgctcgctggcgttgtccgccagaaagggtatccacgctttgatctgccagatgagttattcccgtggcctgcattgctttcgttaccgcttcttcatcctctttgcgccagcgggtaaacagcggttgatgcggataacgtccacgcgccaccagctcctgcacggtgatatcgcccggcgtggtagcattttgcgccaacagaccaatccggcgtgcaacctctttactggcgtaatgttgaatgtgctcgccatccagccagacatgcccatgagcaggcgtcatcaggcggcttaaggtacgcagtaacgtggatttaccgcagccatttggcccgataattgccgtgaagtgaccatcaggtatttctacagtcagattttccgcaacggtatatttgccatatcccagggttaactgttcgccgcgcaaacgggctacactttcggtcattttttgcgagactcctgaattaacaagacgataaggtaaataccgccgaggctgacggtaacgacgccaaccggaagttgatacggcataaacagttgttgggcgcagagatcggccgccagcagtaacagcgccccgcatagcgccgcctgggttagcccccagcgagcggtgccgctaatgcgtcgggcaatgtgcggtgcgactaaagcaataaaggaaatcggcccggcaagcgctgttgccgcagcggtaagcaccactgcaaccagcatcattaacagacggctacgttcgacgctgacgcccagcgcacacgcggtatcatcgcccatttccagcaagcgcatccggcgtaccagtaaggcggcggcaatgagcatcaatataatgatgggtgcggaagggctggtttttgcccacgtcaggccgttgaggcttccggcattccacaaacctgctgttagcgccgtttctaaagacgctttcagcaacagccaggtattaaaggccaccagcatggcgcgaacgccgataccgataataatcaaccgaaaggtgtcgatgccgttgcgccaggcgagcagccagaccagcaggctagtgacaatgccgcccaccattgcactcagcgcgatagccgtcaggtcctgaccaaacagcaccatcgccaccagcacgccgctccacgccccggtgttaaagcccattacgtcagggctgccgagcgggttacgcatcaggctctgaaaaatcgcgccactgacgcccagtgctgcgccaatcaacagcgccatcagcacgcgtggtaaacgccattcggtgaccaccatcgtcatactgcgcggcgcatcgcccatcagcgcggcgaatacctggctggtttccagcgtgacggcaccgctgcgtaatccccagatacctgcaaccacacaggcggaaaccagcagcaaacaggtgatgagtaatcggcgagagacgtaaatcatgcaccacctcgcgttttacgtcgcacgaggaagatcagcaccggtgcaccaataaacgcactgaccacagaaacgcgcagttcgccgggcacaatcacccgcccgatgatatcggcaaacagcagcagggcaggggtagcaagtagcgtgacgggcaggctccagcgatgatcggcacccaccagccaacgcgccatatgcggcatcatcaggccaataaaggcaatcgggccaactattgccgtcgcactaccacaaagcacggtaatcgccagcagaccaatcaactgtgtgcgcgccacgcgactgcccagcgccgtcgcggtgtcgctgccgaggctcaaactgttcagcgcgcgactcagtaatagcgcagttgctccggcgatcagcaccgggatcagcaccacttttaaggtatgtagattgcgaatatccaggctaccggcttgccagaaacgcaactgatcgtagacgtcaggattaagcagggcgatgccgctggtcagtccttccagcaccgccgccagcgccacgcccgccagggttaaacgcaccggacttaactgcccgccgccctgactgccggtaaaggcaacaatcaaactggccaccagcgccccggcgaaggccatcgccagttgttcctgcgcggaagagtaaccaaacagcgccgcacccagcacaatggcaaagctggctccggcgttcacgccaagcaagccggggtcggcaagtgggtttcgggtgagggtttgcattaacgccccggcaaggccaagcgcgccgcctgccagtaaaccggcaagggtacgcggcagccgcgcgtcgagcacgatggtgcagtcggcgctctggcaggtgccggagaaggcctccagcactacggaagcggggagactttttgccccaatgagcaggcttaatgccgtcgcgataatcagtaataacagcaatccgggcacggcaatggcgcgtgtcacggcaacagaaccagacatacgaacttccatgataatgaaattaattatcgttatcgatcttatttggatatgttagcatgtgcagcctaagaataggtatttaaaatatttgatggcaaggcattgtaatgaataaacaatcctggctgcttaacctcagcctgttgaaaacgcacccggcgtttcgcgcagtattcctcgctcgtttcatcagtattgtgtctctgggtttgctcggcgtcgcggtgccggtgcagatccagatgatgacacattccacctggcaggtggggcttagcgtgacgctgaccggcggcgcgatgtttgttggcctgatggtcggcggtgtgctggcggatcgctatgagcgcaaaaaagtgattttgctggcgcgcggcacctgtggcattggcttcattggactgtgccttaatgcactgctgccggagccgagtttgctggcaatctatttacttggtttatgggatggttttttcgcaagccttggcgttacggcgctattggcggcgacaccagcactggtagggcgtgaaaacttaatgcaggccggggcgatcaccatgttgaccgtgcgtctggggagcgtgattagccccatgattggcggtttattgctggcgaccggtggcgtagcctggaactacgggctggcggcggcgggcacgtttattaccttgctaccgttgttaagccttccggcgttgccaccgccaccgcagccgcgtgagcatccgttgaaaagtttactggcaggatttcgttttctgcttgccagcccgctggtgggcgggattgcgctgctgggtggtttattgacgatggcgagcgcggtgcgggtactgtatccggcgctggctgacaactggcagatgagtgcggcacagattggttttctctacgcggcgatcccgctcggcgcggctattggtgcgttaaccagcgggaagctggcacatagtgcgcgaccagggttattgatgctgctctccacgctgggaagcttcctcgccattggtctgtttggcctgatgccgatgtggattttaggcgtggtttgtctggcgctgttcggctggttgagtgcggtcagcagcttgctgcaatacacaatgctgcaaacgcaaaccccggaagcgatgttagggcggattaacggtttgtggacggcgcagaacgtgacgggcgatgccataggcgcggcgctgctgggtggtttgggcgcgatgatgacaccggttgcttccgcaagcgcgagcggttttggtttgttgattatcggcgtgttgttattgctggtgctggtggagttgcgacattttcgccagacgccgccgcaggtgacagcgtccgacagttaatgcttaaaacagcgccttaagcctatccagcacttgcatggcgctgtagtaatccagacggaacgtctcggttcccagcgcataaacctgcttgttttgtactgcaggcaggtgcgcgagcagcggattagcataaatagcatcggcatctttctgatcaccggcgaacaggaatagactctcgccatttaaccctgcagccagattttccccaccaagctgaatgatgtcatggcgtttaccctgactttggctggcatttaaccctgcgggtaacttcgccagcgtaaagccgagttgttccagcatctgcccttgtgcactttctggcgtccagagattggcactgtgtgcagcggcagtatagacaatggcagtgaccggctgcggcggtaatttgatttgctctttcgccgccgccagttgcttatcaaactgcgcaatccgctctgccgcttgtttctcatgcccggtaatttcgccaagttgcgttaacaggctctgccagcttttgtcgtcgtaattgatgattaatgtcggggcgatggtggaaagctgatcatacagtgccagcgcgctatccccgccggttgcgctaattaaaatcagatccggcatttgcgcggcaacggcttcggcgctcggttcgccgatatagagccgttgcagtttgcgttctttcgccaccttgctccactggcgtaaaaagccctggtcatccgcgacgcggttattcggcgtggtcgcgccgctggcgatcaccggagcatcaatcgccagcagactgccggtcagggtgacgctggtggaaacaatacgctgcggctggctttccagtgtatgtgtgccacggctgtcagtaatctgacgcggccagtcagcggcctgaactgcggctattccactaagcaaaagtcctgttaatagaagggcgttgcggtagagcggggcgagtctcacaaatcagcttcctgttattaataaggttaagggcgtaatgacaaattcgacaaagcgcacaatccgtcccctcgcccctttggggagagggttagggtgaggggaacagccagcactggtgcgaacattaaccctcaccccagccctcaccctggaagggagagggggcagaacggcgcaggacatcacattgcgcttatgcgaatccatcaataatgcttctcattttcattgtaaccacaaccagatgcaaccccgagttgcagattgcgttacctcaagagttgacatagtgcgcgtttgcttttaggttagcgaccgaaaatataaatgataatcattattaaagcctttatcattttgtggaggatgatatggatacgagtctggctgaggaagtacagcagaccatggcaacacttgcgcccaatcgctttttctttatgagcccgtaccgcagttttacgacgagtggatgtttcgcccgcttcgatgaaccggctgtgaacggggatagccccgacagtcccttccagcaaaaactcgccgcgctgtttgccgatgccaaagcgcagggcatcaaaaatccggtgatggtcggggcgattcccttcgatccacgtcagcctagcagcctgtatattcctgaatcctggcagagcttctcccgtcaggaaaaacaagcttccgcacgccgtttcacccgcagccagagcctgaatgtggtggaacgccaggcaattccggagcaaaccacgtttgaacagatggttgcccgcgccgccgcacttaccgccacgccgcaggtcgacaaagtggtgttgagtcggttgattgatatcaccactgacgccgccattgatagtggcgtattgctggaacggttgattgcgcaaaacccggttagttacaacttccatgttccgctggctgatggtggcgtcctgctgggggccagcccggaactgctgctacgtaaagacggcgagcgttttagctccattccgttagccggttccgcgcgtcgtcagccggatgaagtgctcgatcgcgaagcaggtaatcgtctgctggcgagtgaaaaagatcgccatgaacatgaactggtgactcaggcgatgaaagaggtactgcgcgaacgcagtagtgagttacacgttccttcttctccacagctgatcaccacgccgacgctgtggcatctcgcaactccctttgaaggtaaagcgaatagccaagaaaacgcactgactctggcctgtctgctgcatccgacccccgcgctgagcggtttcccgcatcaggccgcgacccaggttattgctgaactggaaccgttcgaccgcgaactgtttggcggcattgtgggttggtgtgacagcgaaggtaacggcgaatgggtggtgaccatccgctgcgcgaagctgcgggaaaatcaggtgcgtctgtttgccggagcggggattgtgcctgcgagcagtccgttgggtgagtggcgcgaaacaggcgtcaaactttctaccatgttgaacgtttttggattgcattaaggagcgaggatgagcattccattcacccgctggccggaagagtttgcccgtcgctatcgggaaaaaggctactggcaggatttgccgctgaccgacattctgacgcgacatgctgcgagtgacagcatcgcggttatcgacggcgagcgacagttgagttatcgggagctgaatcaggcggcggataacctcgcgtgtagtttacgccgtcagggcattaaacctggtgaaaccgcgctggtacaactgggtaacgtcgctgaattgtatattacctttttcgcgctgctgaaactgggcgttgcgccggtgctggcgttgttcagccatcagcgtagtgaactgaacgcctatgccagccagattgaacccgcattgctgattgccgatcgccaacatgcgctgtttagcggggatgatttcctcaatactttcgtcacagaacattcctccattcgcgtggtgcaactgctcaacgacagcggtgagcataacttgcaggatgcgattaaccatccggctgaggattttactgccacgccaagtcctgctgatgaagtggcctatttccagctttccggtggcaccaccggcacaccgaaactgatcccgcgcactcataacgactactactacagcgtgcgtcgtagcgtcgagatttgtcagttcacacaacagacacgctacctgtgcgcgatcccggcggctcataactacgccatgagtagcccaggaagcctgggcgtctttcttgccggaggaacggttgttctggcggccgatcccagcgccacgctctgtttcccattgattgaaaaacatcaggttaacgttaccgcgctggtgccacccgcagtcagcctgtggttgcaggcgctgatcgaaggcgaaagccgggcgcagcttgccagcctgaaactgttacaggtcggcggcgcacgtctttctgccacccttgcggcgcgtattcccgctgagattggctgtcagttgcagcaggtgtttggcatggcggaagggctggtgaactacacccgacttgatgatagcgcggagaaaattatccatacccagggttacccaatgtgtccggatgacgaagtatgggttgccgatgccgaaggaaatccactgccgcaaggggaagtcggacgcctgatgacgcgcgggccgtacaccttccgcggctattacaaaagtccacagcacaatgccagcgcctttgatgccaacggtttttactgttccggcgatctgatctctattgatccagagggttacatcaccgtgcaggggcgcgagaaagatcagattaaccgtggcggcgagaagatcgctgccgaagagatcgaaaacctgctgctgcgccacccggcggtgatctacgccgcactggtgagcatggaagatgagctgatgggcgaaaaaagctgcgcttatctggtggtaaaagagccgctgcgcgcggtgcaggtgcgtcgtttcctgcgtgaacagggtattgccgaatttaaattaccggatcgcgtggagtgtgtggatagtcttccgctgacggcggtcgggaaagtcgataaaaaacaattacgtcagtggctggcgagtcgcgcaagtgcctgaaggagagaacacgatggctattccaaaattacaggcttacgcactgccggagtctcacgatattccgcagaataaagttgactgggcctttgaaccgcaacgtgccgcgttgttaatccatgatatgcaggactattttgtcagcttctggggcgagaactgcccgatgatggagcaggtgatcgcgaatattgctgcgctgcgcgactactgcaaacagcacaatatcccggtttattacaccgcccagccgaaagagcagagcgatgaagatcgggcgctgttgaatgatatgtgggggccgggcctgacccgcagcccggaacagcaaaaggtggtggatcgcctgacgccagatgccgacgacacggtgctggtgaagtggcgctacagcgcgtttcatcgttctccgctggagcaaatgctgaaagagagtggacgtaaccagctgattattaccggggtatatgcccacattggctgtatgaccaccgcaaccgacgcatttatgcgcgatattaaaccgtttatggtggcggatgcgctggccgatttcagccgtgacgagcatttgatgagcctgaaatatgtggccggacgttctggccgggtggtgatgactgaagaattactgccagcacctatccccgccagcaaagcggcgctgcgtgaggtgatcctgccgttgctggacgagtccgatgaaccgttcgatgacgacaacctgatcgactacggtctggatagcgtgcgcatgatggcgctggcggcgcgctggcgcaaagtgcatggtgatatcgactttgtcatgctggcgaaaaacccgaccatcgacgcctggtggaagctactctcccgcgaggtgaaataatggatttcagcggtaaaaatgtctgggtaaccggcgcaggtaaaggtatcggctacgccacggcgctggcgtttgttgaggcgggagcgaaagttacaggttttgatcaagcgttcactcaggagcaatatccctttgcgaccgaagtgatggatgttgccgacgctgcgcaggtcgcgcaagtgtgtcagcgactgttagctgaaacggagcgactggacgcgctggtcaatgcggcgggaattttacgcatgggcgcgaccgatcagctcagtaaagaggactggcagcagacttttgcggttaacgtcggcggtgcgtttaacctgttccagcaaaccatgaaccagtttcgccgtcagcggggcggggcgattgtcactgtggcgtccgacgccgcgcacacgccgcgtattggcatgagtgcttatggcgcaagcaaagcggcgctgaaaagcctggcgttgagcgtcgggctggaactggcgggtagcggcgtgcgctgtaatgtggttagccctggctccaccgacaccgatatgcaacgcacgctgtgggtgagcgatgacgccgaagaacagcgtattcgcggctttggcgagcagtttaaactcggcattccgctggggaaaatcgcccgtccacaagagatcgccaacacgattttgttcctcgcctctgacctcgccagccatattaccctacaggatattgtggtcgatggcggcagtacgctgggggcataagcatgatctggaaacgccatttaacgctcgacgaactgaacgccaccagcgataacacaatggtggcgcatctgggaattgtgtatacccgtctgggcgatgatgtgctggaagccgaaatgccggttgatacccgtactcatcagccgttcggtttactacatggcggcgcgagcgcggcgctggcggaaacgctgggaagcatggccggatttatgatgacccgcgacggacagtgtgtggtaggcacagaacttaatgcaacacaccatcgcccggtgtctgagggaaaggtacgcggcgtctgccagccgctgcatcttggtcggcaaaatcagagctgggaaatcgtcgttttcgatgaacaggggcggcgttgctgcacttgtcggctgggtacggcagttttgggatgaacccgacagaattagatgagattgcaggaaaactcggttaacggagtgatcgagttaacattgttaagttaaatattggtttcaactccgatttacatggttgctgtgttgttaaattgtacaaagatgttatagaaacaaaatgtaacatctctatggacacgcacacggataacaactatgaacaaaagtgggaaatacctcgtctggacagtgctctctgtaatgggagcatttgctctgggatacattgctttaaatcgtggggaacagatcaacgcgctgtggattgtggtggcgagcgtctgtatctatctgatcgcttaccgtttttatgggctgtatatcgccaaaaatgtgctggcggttgacccgacgcgtatgacgccagcggtgcgccataacgacgggctggactatgtgccgacggacaagaaagtgctgttcggtcaccattttgcggccattgccggagcaggtccgctggtggggccggtactggcggcgcaaatgggctacctgccggggatgatctggctgctcgctggggtggttctcgccggtgcggtgcaggatttcatggtgctgtttgtttctacgcgccgtgacggtcgcagcctgggtgagctggtcaaagaagagatggggccaaccgccggggtgattgcgctggtggcctgctttatgatcatggtcattatccttgcagtgctggcgatgatcgtggtgaaagccctgactcatagcccgtggggaacatataccgttgcgttcaccattccgctggcgctgtttatggggatctacctgcgctatctgcgtccggggcgtattggcgaagtgagcgtcatcggtctggtattcctgattttcgccattatctctggcggctgggtggcagaaagtccgacctgggcaccgtactttgactttaccggcgtgcagttgacctggatgctggtgggttacggttttgtggcggcggtgctgccggtgtggttactgctggccccgcgtgactacctctctaccttcctgaaaatcgggactatcgtcggtctggcggtaggcattttgattatgcgcccgacgctgaccatgcctgcgctgaccaaatttgtcgatggcactggcccggtatggaccggtaacctgttcccgttcctgtttatcaccatcgcctgtggcgcggtgtctggcttccatgcgctgatctcttctgggaccacgccgaagatgctggcgaacgaagggcaggcgtgctttatcggctacggtgggatgttaatggaatccttcgtggcgattatggcgctggtttccgcctgtatcatcgatccgggcgtgtattttgccatgaacagcccgatggcggtgctggctccggcagggacggcggatgtggtcgcttctgccgcgcaggtggtgagtagctggggctttagcattacaccagatacgctaaaccagattgccagcgaagtgggtgaacagagcatcatttcccgtgcgggcggtgcgccgacgctggcggtggggatggcctacattctgcacggcgcgctgggcggcatgatggatgtggcgttctggtatcacttcgccattttgtttgaagcactgtttattctgacggcggtggatgcaggtacgcgtgctgcgcgctttatgttgcaggatctgctgggcgtggtgtctcctggcctgaagcggaccgatagtctgcctgctaacctgctggcaacagcgctgtgcgtactggcgtggggctacttcctccatcagggcgtggtcgatccgctgggcggcattaacactctgtggccgctgtttggtattgccaaccagatgctggcagggatggcgctgatgctctgtgccgtggtgttgttcaagatgaaacgtcaacgttacgcctgggtggcgctggtaccaacggcctggctgctgatttgtaccctgaccgcaggctggcagaaagcgtttagcccggatgcgaaagtcggcttcctggccattgctaataagttccaggcaatgatcgacagcggcaatattccgagccagtatactgagagtcagctggcgcaactggtgttcaacaaccgtctggatgccgggttaaccatcttctttatggtggtcgtggtggttctggcactgttcagcattaagacggcacttgcggcattgaaagatccgaagccaacggcgaaagaaacgccgtatgaaccaatgccggaaaatgtcgaggagatcgtggcgcaggcaaaaggcgcacactaaagtcagagtgagggggggatgttggcgaatgttggcttagtgcccagggttccctctcaccctaaccctctccccggtggggcgaggggactgaccgagcgcgttgatagcatttgtaggccggataaggcgttcacgccgcatccggcactctttcagcaacatggttagcggaggccaagatgtttgatagtctggcaaaagccggaaaatatttaggtcaggcggcgaagctgatgattggtatgcctgattacgacaactatgtcgaacatatgcgggttaaccatcccgatcaaacgccgatgacctacgaagagtttttccgtgagcggcaggacgcgcgctacggtggaaaaggcggcgcgcgctgctgctaaatttgtacgtcaggctttaaagctttccacttttttgaacgctgcacgcaacgtatctggtgtcagcgtgactggcaggtaatgaatggactccaccggacgcagggtgtgggcaatcactttgtcgatctccgcctgattattgatatccacttccagctccgccagtgtagtcggcagatgaaaacgctgatacgctccagttaattgcgccagcacatcatcctgacccagcaaggcgctttgcaccagaattccgtaggcgactttggtgccgtggagaaacttctcggtttgcggcagcacggtcagaccgttatgcacggcatgagctgccgccacacgcgtaaaacgatcgcccagaccaccaaccatcccaccaccagcaataatagcatccaccacatcgcaaaaactttgcgttaactgttgattttgctgatcgctcagcgcctgttcgctactgtttaacaagacgtcgcgaatggcttgcgcattattgatccccagtcgcacggttagcggcaacgtttctggttgcggagccagcaccaccgcttcataccatttcgccagcgtgtcaccgatccccgccagcagatattgttgcggtgcattgaggataatctccggttccaccagcaccataaaattggcgtcgtcgaaaatctcataatgcagcgcctgtccggcatcattataccagacggagagcggtgtccaggcggcgcaggtggcggcgatcgtcggaacggcaacaaacggcagaccgagacggcgggcgagggctttcgcggtgtcgagcagtgcaccgccaccgacgccaatcaccacgctgcggtcgtcaccggactcagccgccagttgttgtacatcgctttcgctgcaatgaccgcgaaacaaaatatgctttgcccctggcagtccaaacgctggcggaagtttggtttgcgccgcagcaatggcgcgtttgccgtagatccacaccgcgcgagaaagttgttcatcagtgaaaaaatcgtgcaggtgattgaaacttcctggatgactaaagtagttagccgggccgacgaccacgcggataggattgtgaggcatgttgtgttgtccttattgttttatttagacatctaaacgtcttgattgccaaatactagcatcgtgttatagtgccttcaacacgcaacttcgtcaggtacaataaaaatgacaaataaccctctgattccacaaagcaaacttccacaacttggcaccactattttcacccagatgagcgcgctggcgcagcaacaccaggcgattaacctgagccaaggctttcctgattttgatggtccgcgctatttacaggagcggctggcgcaccacgttgcacagggggcaaaccaatacgcgcccatgaccggcgtgcaggccttgcgcgaggcgattgctcagaaaacggaacgtttgtatggctatcaaccagatgccgatagcgatatcaccgtaacggcaggggcgacggaagcgttatacgcggcgattaccgcactggtgcgcaatggcgatgaagtgatttgttttgatcccagctatgacagttacgcccccgccatcgcgctttctgggggaatagtgaagcgtatggcactgcaaccaccgcattttcgcgttgactggcaggaatttgccgcattattaagcgagcgcaccagactggtgatcctcaacactccgcataaccccagtgcaactgtctggcagcaggctgatttcgccgctttgtggcaggcgatcgccgggcacgagatttttgtcattagcgatgaagtctacgagcacatcaactttagtcaacagggccatgccagtgtgctggcgcatccgcagctgcgtgagcgggcagtggcggtttctagttttggcaagacctatcatatgaccggctggaaagtgggttattgtgttgcgccagcgcccatcagcgccgaaattcgcaaggtacatcagtatctgacctttagcgtgaataccccggcacagctggcgcttgctgatatgctacgtgcagaacctgagcattatcttgcgttaccggacttttatcgccagaagcgcgatattctggtgaatgctttaaatgaaagccggctggagattttaccgtgtgaaggtacatactttttgctggtggattacagcgcggtttctaccctggatgatgttgagttttgccagtggctgacgcaggagcacggcgtagcggcgattccgctgagcgtgttttgcgccgatcccttcccacataaactgattcgtctctgttttgccaagaaggaaagcacgttgctggcagcagctgaacgcctgcgccagctttaattatttaaccgtccaggcgcgggaatattgacggtcggcaaacaactcttgcaggccgttaatttgcttcaggcgcagcacttcgtcgctgtccattcccagctctttgccaattttattatcgtcccatcccaactggctaagttcacggacgatttcgctcatggcggtgatttgatggcgtccacgagcgcgattatgacgaatagtcgcggcgatgcgttgattacgcgtaccttccagacaggtcaccggcaaataaccttttaagcgtaattttaaactactactgcctttaccaatttcatggcggtgaaaaccatccacgatttccatggcatttttatccgtatgtgtgaccacaatgggttgggtaaaaccatctatttcaatggatttttgcagcagttttttttcgggtggtgccacgttgtttgggttgtaatcattaggcataagttggctgtttttaacccacagaacgcaatccactggctcttcacgaaaggggctaacctgatggatcgccatgcggatttcattaatcgctttgatgcgatcatcttccggcaagctggcgagaaattgcgttaaatcctgcgttaatcgttgttgcatagtatcccccattcctgacgttttccttttatccgttcgttataacgctgatagttcttgctttttgtggggctaaaacttaatgcccgacaccagtaatcgttattgagtaaaactttgcatatccgccgccaggaggggatatctttcgcgccaatgtccccttgctgggtttgtggaacctcgatgccttttttctgataccagtgcaaataaatggcgattttattgcggtaatgctcagctgttttttccggcatgctattgagcagcaataatgcatattcttgccagtctaaatgttctggcttgaggattttccgatgcccatagaaatgattgtcatgtccggcgtaaatgccgccactttttaccccgctgactcgtgcgcacatagcagcccagcgatccggttcgataacgtgatagagccataatccttgtcgttgctccgggccaaaaggttcgcaaattcgcatatgacgcagaggaacgcctgcctgatacattaggttatacagtgggttgcagagactttgatgatttgcataccaggtccagatatcagccactttccagtcgtaaatggggtaaatgtaccagctatgaccgcctggtgcggccgtagtccagggtttatcgtcggcaaaacgttgtttatttaaactggcgatggcgacaaaacggttgtaggactcatccgcacggatgccgatcatcatcgccgccggacgtttttgactaaaccattcggcaaactcacgtacaaattgttcgaaggtcatgcctggctggtaaaagcagaaaaagtcagggtcggttatcgcatcttggggaggttgacgtacccattcgacatcaggttcccagcactgccattcgggttggtattgactaagggaattttgcgtcgtaagcgggagcgcaacccagtaaaactcttcgatgacatcggtgtacaactcgcgcagggactgaacatagttaatggtgcaagagaattgcgcctcccagtcgataaacaaaacgcagatttttttgcccatttgtcgggcaagttcggctgtcagatgcagcattaaaccagagtctttgccgccagaaaaactgacacaaacgcggggtagggtgttgagtgtccaggtaatacgctctcgtgcagcttccagaatattgagcggaagaggaattttataaatagacatctgaagacgctctctgaacgttacagggtgatcagtgagataagtctgttaattataaagtaaacactgtaaagcagagtgttttatttttcattcgcgctgtgaataaatagatgaaagttatagtagctgtctgtagttatatatcaaaaactctcatttagacggtcaataaatcgggagaacaccaaattatttaaagaagatttattataggaaatgtaaagctttatactaggtaacggatgttctagttttatctcttttaagttaagaaagtcacggtaggaattataaagttcataggggactattcccagtaaatctgtaactgcaatgctattaatgattgtcagcaaagaggaaccacgaaaactgattttgcgattcataaatctctcgtctatttccatttgaatatcatcaacccctgcacttttagatattaattgggtgaactcttctgccataatttgttcataagtgctattgtcagtaattcgtggatgcctattactacaaattagagtattgcgaatcgtatgcaatggcatgcaaatgacggaacggctgatcactggcatttgggtgatcaccagatcggctttgcggtgaaccaacagttcttcagcattctctgcactcatgaggatatcatggcactcaatctcgacagaggaatcttgccgtaggcagcggatcagcatactattattagagcaagaaatgagctgagggccgtagataataaagtttttctttagttcggacttattgactatattaattgtttgttcaaggcctctgagatttttctcaagatggtgatgcagatttaaccctgttgtcgtcggcgcgataccttttccactgcgaatgaataaagggtcattaaattgcgcacgtaagcgttgtaagctctggctcacggcacttggggtgatatatagactttcagcagctttgctaatgcttaaatgctggtaaatacactcaaatatgacaagaagatttaagtcgaactttttcaagtcgtagagattggccatacactactccggttatatttttcttccatgatatattcacttaatcaatgttttttgcgtatatatttttattgattatgtttttttgcttaactcaggattaagtttttctaaaatagcacagccacttagggcagagcgagcaattcatgcttttttaggatggttgaaaagcagggatatagttcaaccatccatgaattaccttttatttattccccataatgatattaagcgttttctgatcgggcaaccccacggcctgttgtagcgtattttccttactcatgtaatagatagccggcgtgacatttgcccccagatcgtccatcagtttctcattgtcacttaacactttcatttgctctgtacttacgtttgcaggcacgtttagcttaagcttgccaccagaggcttcatattgttgccaggtttttgcgggatctttggaggcaagaattgccgctgctgtcgccgggctttctggcttgataaccccaaccaacaatgttcttaattgcactttgccagaatctacccacgggcgcgcctgctgccagaactgtttacaatatgggcagaacggatcggcgaagacgtagacaatgaccggcgcatcttttttaccgtcgaggagccagtgggattgttccatccgttgccacatttcgcgtccggctggtgcgtaaatttctttttcgataagtgtgttactcaggttttcacctttctcgttgtacatgtaaccagagatagcgtgcttaccatctggagtcaggtagatggtgacgcccatatcctgatactttccgagataacctttcattcctccgggggcatcgaatgttttgatgattgtaatgccctgtttttcaatcgcttttactggagcaggaagttcctctgcgaaggcgattgcaggaagcagagccagtaaaagtatcttttttaacattaatttgtccttttcagtcagtgcaaaagtcgagtaaaaggcataacctatcactgtcataggtaagagcttagatcaggtgattgccctttgtttatgagggtgttgtaatccatgtcgttgttgcatttgtaagggcaacacctcagcctgcaggcaggcactgaagataccaaagggtagttcagattacacggtcacctggaaagggggccattttactttttatcgccgctggcggtgcaaagttcacaaagttgtcttacgaaggttgtaaggtaaaacttatcgatttgataatggaaacgcattagccgaatcggcaaaaattggttaccttacatctcatcgaaaacacggaggaagtatagatgtccttgattaacaccaaaattaaaccttttaaaaaccaggcattcaaaaacggcgaattcatcgaaatcaccgaaaaagataccgaaggccgctggagcgtcttcttcttctacccggctgactttactttcgtatgcccgaccgaactgggtgacgttgctgaccactacgaagaactgcagaaactgggcgtagacgtatacgcagtatctaccgatactcacttcacccacaaagcatggcacagcagctctgaaaccatcgctaaaatcaaatatgcgatgatcggcgacccgactggcgccctgacccgtaacttcgacaacatgcgtgaagatgaaggtctggctgaccgtgcgaccttcgttgttgacccgcagggtatcatccaggcaatcgaagttaccgctgaaggcattggccgtgacgcgtctgacctgctgcgtaaaatcaaagcagcacagtacgtagcttctcacccaggtgaagtttgcccggctaaatggaaagaaggtgaagcaactctggctccgtctctggacctggttggtaaaatctaaatttccttcgtctttcacgccatagcggcgttggcgtcgcccgctcaccccggtcacttacttgtgtaagctcccggggattcacaggctagccgccttgctctgacgcgaaatacttcggaaattcacctaattcttcgggtgctgcggcacccgattttcttccccgcaccatgatgcaagctgcatccaggtagccgcagaggccgcttgcatgatgatgtttaaagcccaggagataaacatgctcgacacaaatatgaaaactcaactcaaggcttaccttgagaaattgaccaagcctgttgagttaattgccacgctggatgacagcgctaaaagcgcagaaatcaaggaactgttggctgaaatcgcagaactgagtgacaaagtcacctttaaagaagataacagcttgccggtgcgtaagccgtctttcctgatcaccaacccaggttccaaccaggggccacgttttgcaggctccccgctgggccacgagttcaccagcctggtactggcgttgctgtggaccggtggtcatccgagcaaagaagcgcagtctctgctggagcagattcgccatattgacggtgattttgaattcgaaacctattacagcctctcttgccacaactgcccggacgtggtgcaggcgctgaacctgatgagcgtactgaacccgcgcatcaagcacactgcaattgacggcggcaccttccagaacgaaatcaccgatcgcaacgtgatgggcgttccggcagtgttcgtaaacgggaaagagtttggtcagggccgcatgacgttgactgaaatcgttgccaaaattgatactggcgcggaaaaacgtgcggcagaagagctgaacaagcgtgatgcttatgacgtattaatcgtcggttccggcccggcgggtgcagcggcagcaatttactccgcacgtaaaggcatccgtaccggtctgatgggcgaacgttttggtggtcagatcctcgataccgttgatatcgaaaactacatttctgtaccgaagactgaagggcagaagctggcaggcgcactgaaagttcacgttgatgaatacgacgttgatgtgatcgacagccagagcgccagcaaactgatcccagcagcagttgaaggtggtctgcatcagattgaaacagcttctggcgcggtactgaaagcacgcagcattatcgtggcgaccggtgcaaaatggcgcaacatgaacgttccgggcgaagatcagtatcgcaccaaaggcgtgacctactgcccgcactgcgacggcccgctgtttaaaggtaaacgcgtagcggttatcggcggcggtaactccggcgtggaagcggcaattgacctggcgggtatcgttgagcacgtaacgctgctggaatttgcgccagaaatgaaagccgaccaggttctgcaggacaaactgcgcagcctgaaaaacgtcgacattattctgaatgcgcaaaccacggaagtgaaaggcgacggcagcaaagtcgttggtctggaatatcgagatcgtgtcagcggcgatattcacaacatcgaactggccggtattttcgtccagattggtctgctgccgaacaccaactggctcgaaggcgcagtcgaacgtaaccgcatgggcgagattatcattgatgcgaaatgcgaaaccaacgtgaaaggcgtgttcgcagcgggtgactgtacgacggttccgtacaagcagatcatcatcgccactggcgaaggtgccaaagcctctctgagtgcttttgactacctgattcgcaccaaaactgcataagaagaagtaagattcacctgcaattgcttagccgccggggtcaaacctggcggcttttttatggcattaaaaagccccgccgggatggctccgggcagggcgggatacttattctggcaattaacgcacaaccagcaccggcagattggcgtggcggatcacgctgctggcgttagaacctaacagatgggtgctaatgcttgggttgcgagaaccaataactacaacatcagcccccagttcttctgccaactcattgacttcatcccgcacgctaccaaaacggacatgttgtttaatgcgggaaggatcgatggtgaagtggctgaccatcgtttgcagacgttcttgtgcttcatgttgcagatgctcttcaaaacgacgcacatcagcggcaaaacggtgcaggctcaggctggcactcccgggtagtacgtgaagtagatgaataactccgtcatcctgggcgaggaattcagcgtggcgaacagctttgtcgctcaattccatttcaaatacatcaactggcataatgattgtcttatacataaccctttctccctgttaatcatgaacaaatcattcgccatgattataatatttatccctgatatttgtctggttctttttccttacgaactgtttctgtgatgaatatattctcactgaacaccaggaattctcccaaaacctgtggtaccgcccgttttcccgctgtgatagctacccttaaagactgactcttttttgaactgtctctggaggttgcatgaaagcattgacttatcacggcccacatcacgttcaggtagaaaatgttcccgatccgggcgttgaacaggcagatgatattattctgcgtattacggcaacggcgatctgtggctctgacctccatctttatcgaggcaaaatacctcaggttaaacatggcgatatttttggtcatgaatttatgggggaagtagttgaaaccggaaaggacgtaaaaaatttgcaaaaaggcgaccgagtggtaattccgttcgtcattgcttgtggcgactgttttttctgtcgattgcaacaatatgccgcctgcgaaaataccaatgcgggtaaaggcgctgcgctcaataaaaaacagataccagctccagcggcattgtttggttatagtcacctgtatggcggcgttcctggtgggcaggcggaatatgtccgcgtccctaaagggaatgtggggccgtttaaagtaccgcctttgcttagtgatgataaagcgcttttcctttctgatattctgccaacggcatggcaggcagcaaaaaatgcgcagatccaacaaggtagtagcgttgcagtctatggtgctggtcctgtgggattgttgacaatcgcctgtgcacggttgctcggtgcggaacagatttttgttgttgatcatcatccctaccgcttgcatttcgccgccgaccgctacggcgcgatcccgattaattttgatgaagacagcgatccggcacagagtattattgaacaaacggcaggtcaccggggcgtggatgcagtaatagacgccgtcggttttgaagcgaaaggcagcaccacggaaacggtgctgactaacctgaaactggagggcagcagcggtaaagcgttgcgtcagtgtattgcggcggtcaggcgtggcggcattgttagcgtaccgggcgtctacgctggatttattcacggtttcctgtttggcgacgcctttgataaagggttgagctttaaaatgggacagacccacgttcacgcatggctgggagaattattaccgttaattgagaaaggattactgaaaccagaagaaattgttacccactatatgccgtttgaagaggccgcccggggatatgagattttcgaaaaacgtgaagaggagtgccgtaaggtgattctggtacccggtgcacaaagcgcagaggcggcgcagaaggcggttagtggtctggtgaatgcgatgccggggggaacaatatgatcgtcaggagtggttttcgaggtaaaggacagccatgacgataatcgccgccataatcagaaatcctatcaggatgtaaaatgcttctgccatggttattcccacaaacgaaacggaataattttgcagcaaaagtgaacagtgagaaccaggaaaaattgctgattttgcgtaaagaggatgcgagtgcatcctctgggcaaagcgagttatcgcttgtgcagatgggattaaagcaggtagtcgccagcagcttctggctggtattcgagttccagcacttcaaggtgggttgcaacgccgcccggaagttcccagtgaatggaatcgccaacgcgcagccccagcagtgcggcacctaccggagccataacggaaagctgagtattgctatcggtcatttttgccggatacaccagcgtgcgcacacgcacttcgccatcgctaagattgcggaatttaacccggctgttcattgtcaccacgtcgtgtggcatctcttctgggctacacatttgggcgcgatccaactctgcgtttaacgcgtcggcgattggcaaaccagcataggcgggttgctccagcagaatatcgatgcgttcggcatccaggtcgttaatgatgatagttggtctggacatttttactccatgtcgtcggtgctgcgagtgtcgcagataaacatacccaaaagaaaaccctcaccgtcaggcggcgagggtttaactcacatgatgatactgactgttgctcactctttgaagtgatttgcgtcacattcagggaattcctcaatgcagcgcattatgtataaatcttaatcgccttggtttatggaagacgaattagcgtgttttgtaaatcagatgattaataacccgctttatcaatcacaaaggttttgccacagttacctgggtgaggttgtggcaagaaactgtttgcagaaagcggagcgttgatggcgtcagctttgatgctgatctgaatttcagtcaaatacgcagggttaccctggcacgttagcttaactgctttcacgttctcttttccccagcttttggcaaaggcggcgtcaaagtcacggcggctcactgttttaccgtaattatccgcaaggaattttccggcttcgctctctttaatttcttgattcaggcgtaccatcgtaccgaagtatgcgtccggatcaaaaccaaagcaggcaccgtgtttggcatattcgtagcgttccaggcaggaacgtccgccagctcctggcatgacttcacttagtttagcggccgtttccagacttaatccggtttccgggctactacacattcggctggcgcgcgcttctggtagattcgggattgggcgagtagcgcaaccgaagcgcatccagcggcgttcatcaacaccacgggcagcaacgcttttaggcaatcctggccacagaccatgtacggtcagaaaatcagctttgttggtcgtttcggtttgcaggcgacattcatctcgttcgttacgatttcgatcgtgttgactctggcaaaatccggtttgccaggagagggccaggacatagcgatcaaaatcgccatactgttttgcctgcaacgctaaggcgttggcagaagagaagggaagcagagaaaccgcgagcaacgcggcgttacgccagaatgctttcataatgggtgtggaactcatacatacactgaatactatctattaaatcataaaaaagcccgccaggtgggcttacctggcgggcgtgatgatttattcagcgtttggcgaacgtattagttccacatggcgagaatcggccagccaaccaacagcaacatagagatgtaaatcaccccgaagattgcgccaagacgccagtaatctttacttttcacatagccacagccgtaaataatcaccccaggaccggttgcatacggcgtcagacagcccatgataccgatagacagcaccagcaggatacacagttgttccattggtacgcccggaatacctttaccgacggccagaataaccggcagcatggttgcggtgtgcgcagacaggctggcaaacaggtagtgtgcaaagtagaacaccagaaccagtacaatcaccgttgcgtttggactgaatccttccaggtgcgtactcatggtaccggcgaaccagtcaataaaaccagaacgagtcaggccgttagccatcacaaccagagttgccaggttgaccagtgtgttccatgcgctgttatagcgggtaatgtctttccaaggcacaacgtgcagggccagcattaggctaactgccagcagaccaaccgcagtagcattaatgacttcactgccaaatacccacaaacctaagctgagcaatacaaggccaatcagtgtccactctctgcgtgtcagcgcacccatggttttcagttcatcacccgcccaggttgccacttcttcactgtgtgtgatttccggtttgtacagcacgtaggaaagccacggcgcaatgataagcaagataaccccaaccggcaggaagcagaggaaccactgcaaccagctaatctggataccggcaattttgctgacgaactccagacccagcacgtttggtgccgcaccggtgacaaacatggagctactcagactggtactaatgaccatcatccacatcaaatagccgccaatacgacgcgcggacggatcgttcgggaaacttttaaacaacggcggcaggtttttaatgaccggaaaaaccgtacccccggtacgcgcggtgttggaaggtgtaaacggtgccagcagaatgtcgataatgacaatcgcataacccaacgtcagcgtgcgtttgcccatgaatttcaccaggaaaagggcaatgcgacgacctaacccggaaacttcataccctaatgcaaaaataaatgcgccaaataccagccataccgtggtgctggaaaaaccagccaggccccatttcagcgcctgtttttgcgcattaaacgctgggtcagctaattctttggcatcaaagagcaggtaattactgccaataacgcaaatagtaaccgcaataaaactgatcgctgttgccggaattggctcgaggatcatgccgacaatcattgccacaaacacagcgaagtaatgccatgcctgcggcggcataccgtcggggacagggataagaaacatgacacccatcaccaccagtggggccaatagtttccatatattatcttttgctaaagacatacgggttctccgaaaattaatatttccaaatttatcaagtgcttaaataattaaatctgtgctaaaaaccaggtaaggatcagtaggtcagcactgccgcctggactgagatttcgttcgatacactccctgtcgaactgccggagataatcgagatcggcgggggttcgaatgccccctttttgcaataatgtttgcgcctcgcgctgtagccagcgcaggcccccctcgccaccgcggcttgcaacgttggtatcgccgttgatcgccatcagtaggagcaaggtatcgagcaatgccagttcaggatctaacccctgatccagcagagtgaggtaatgcggcaaggcgtgattgatcaccagtggataacccgcttcggcttcaccgcgtgcgccggtaaggccaagctgttggtacaaccgttgacctgccgtcagttgactattattggtacgcagttcgcgatcggtcaggccacggcagaaacttgccgccgtagaacaaacggttgttggcgttaccggttggttgagttgaagcaaacggccaattgccgcacatagcagccctaaagaaaaaatgctgcctttatgcgtgtttacgcccgcagtggcgcggaacatatcaccttcgcaagccataccaattgggcgtaatccgtggagtaccgcttctggtgccatttccgcactacaggcaccaaattcaatgaaacggggtagccagccctgaatcgccagcgcgctgcggtggaaatcttccagcgccatatctttgtgcgcaccgcagttaatgcgatccacgaggcctggtttcggactcagattgacttcagtcagcatggcgcgccagcccagcagggcgtactcatcgattaaactcgtcgcaagctttgtggttttagtactcgttgcaggcatgctcatcgttcagcagtgcctccatgttatttagttgacgttgcaggcatcgacatcgttcagcagtgcctccatgcggttgagtaaatcggtcagttgatgggtttttccacgcgcgcagacggctgcgctttgttcgcacaacaggcagcggcgaggcggcagactatagtcgcggcgggagagaatttcgccttcgggcgtcaggacatcgatatcccataaccgcccgagaggatgactatgttcaagctcaatggtggcgagcttgaggtcgcgagccggggcggcaatgctcaacatgccctccggcccgctggcggaaaccagtgcagcctgctcctgaatttgccagccctgttttgcggctaaggcacgcaaggctgtcacgccatgattaaaaattcggcgtgtgacctcgctgtctttaatcggcccaggcgcaaccacggtaaaggagaccagtggaacaggatggcgcttgagccagacgtgttgccgtgcttgcctttcatcccggctgacgagcagctcgggaatacttaccgcatggtggctggcgagttcaggaagcaggtgcatggcttattccttcacctgatgcacaacatcgatcacgctgccatcgcggtaacgcacaacggcaacgacgcggtctgtgaattcaatcggctgtggttcaccggtcagcagacgcgcacgttcgcgcagccactcaatggaaaccactttaatgcccgcttcctgcagacgttctgccagttccggacgtgccgggttaactgcgataccgtggtctgtgaccagaatatcgacactggagcctggggtgatgcaggtcagtacgttatccaccagagtcggaatacgaccgcgtaccagcggcgcgacgatgatggaaagcgcagaggcaatcgcggtatcgcagtgaccaccggaagcaccacgcagtacgccgtcagagccggtcagcacgttaacgttgaactgggtgtcaatttccagcgcgctcagtaccaccacgtcgagacgatcaacgcttgcgcctttgctaccccagttagcgtactggttggcgctgatttcgatgtgattggggttacgggccaggctttgcgcagcatggctgtcaaagctctgcacatccagcagtttgcggatcagacctttttcgtgcaggtcaaccatcgtcgcggtaataccgccaagggcgaagtcggcgcgaatatcgcggctacgcattttgtcttccaggaaacgggttaccgccaggcttgcgccgccggtgccggtttgcatggagaaaccttctttgaagtagccagagttgacaatcacatccgcagcgctacgggcaataagcagttcgcgcgggttagtggtcatacgggtcgcgccagcgccgatttttgcagcatcgccaacgcggtcaactttgacgatcaaatcaacctgatcttgctcaatgcttgccggattatgcggataaggcagcagttcttcggtaagcatcacgacctgttttgcgttgtcggcatcaactattgcatagccgagggagccgcagcaggctttaccggtgtagccgttggcattaccgaattcatcacaggacgggacgccgaggaaagccacgtcgatattcagttcgccgctctgtaccagatgcacacgaccgccgtgagagtggatctgcaccggttctgccagcagaccacgggagatctcttccgccagtggaccacgcaggccggaggtataaatgcgggtaaccacgccctggcgaatgtgttctaccagcggcgcatggcaatcactcagggagctggacgccagggtcaggtttttaaagcccatcttcgcgatgacgtccatcaccatattgacggtcaggtcaccgccacggaaagcgtgatggaaggaaaccgtcatgccgtcctgtaaaccagagcgacgaatcgcttcttccaggttggcgcacagtttgcgatcgcgcgctttttcagcctggtaggtttgctttgggctgttctggaaagcggcaagatcgcattcagcgcgacgattccaggccgctacccgttcttgtcgttgagattgttcaattttctgcgtcattttgattgccttattcttcgcggatgccggaaagttctgcacgggagagcaccagacgggcgcgatcgataaccggaccgtccaccatcttgccgttcagggaaaccacgccgaggccttcgcgagcggcggcttcagcggcttctacgacgcggcgggcgtgatccacttctttctgggtcggtgcgtagaggttgtgcagcagatcaatctgacgcgggttgatcaggcttttgccgtcaaagcccagctgtttgatgtgggcggcttcttgcagaaatccggcttcgttgttagcgtcggaatagacggtatcgaacgcctgaatacccgcagagcgcgcggcctgcaaaatggaacagcgtgcgaacagcagttcagttccttccggggagcgttctgtacgcaggttgcgcacatagtcttctgcaccgagggcgataccgatcaaacgctcggaagcgtgagcgatttccactgcgcgggtaatccccagcggagattcaatcgccgccagcaggccggtgctgccgggttcacgaccacaggctttttcgatacgcaggatctctttttcaatatccagaacatcctgagcggtatcggttttcggcagacgcacaacgtccgcaccaccgcgaacgacggcttccaggtcgttaacaccccattcggaatccagcgcgttgacacgcacaatggtttcaatatcgcgatacagcggatgttgcagcgcgtggtaaaccatgcggcgggcggtgtctttttcacgcaatgctacggagtcttcgaggtcaaacatcagggcatcagccgggtagatgaaggagttgctgaccatcgcggcattggcaccaggcacaaacaacatgctgcggcgggtgcgagttttacgttgttgcaggctagcggaaatcattggcaatcctcccatggcagagccgggataccgctggcgcgtgccagcagggcttccagtcgtgcacgtaaaatgcagtacagtgcgcctttgtcatcgacattcagctgtacgccgcgcacgttgtagcgggcgagaacgtccagaatggtggtgcgaattgcatcgccaaactgtttctcaacgctgctattgatttgcaggtcgatatcctgcgtatcgagtggggcgatgcgtatcatcacatccccagactcaagggtgcctgcaacggcgggctggtttattttcatttttcacctgtttctcatgcgggggtcttttgacgagctgccgcgtcctggcgggagtgctcaagcaggttctgcaaataatgcagcgtgactgcagggaccagcggcgcgatagccgtgagatcgtttttcgccagcagttgacgtacccgggaagcggatatcggcatctcctggtaacgcagccgctcaatttcaaccagttcgatgggcggtgcggagatagtcggcgtttccagccagtagcgcatatcctggttgtactgggcggtaacgcgacaaaagggttcagtaccgacaaagcggtgagttacacccagcgcgggagcgaggtactgacggaaaatcttcagatcaatttcggtgtaacaatggttaatgacgctctgttctttaatgaagtagcaagggaacgtagcgcgggagatgatgtattcggagccacgatgcacagtcaggcgtggaatatcggcggtgccttttaacaccaaatccagccggtcttcataggggaagcgactagaatcttctttgactaaaaacagatgcaaccagtcgcactgtgccgcagcctgttgaatcagataacggtgaccattcgtaaagggattggcgttcatcacaatgcagccaatcttgttccctggatgacgaaattttttcaggctttcggcatagcgtttcagtcgcgtggcgctgttttccatcagcaccatcacgccgggtacgctggtcagcgtggaaaaaccgcactggcggaacagcgcctcgtattcggttttggtataaataaacagatgcgtgctgtgccgctcataggcgaggtttatcaattcagtggctaatgtcagcgccagtccttcaccgcggacggattcactgatagcaacgcatttaataatatttccggcaattccaccgcacgcgataagcttttcatcgcgggttacggtaataaatacttcgactgtggtgtcaacgctcaaatcattttcatgcaggaattgggcgatttccgccatttttttattttcactacgttttacgcgggtgaaaatatcattgccgaacataataaatagtatcctgaaggtgcatgttgttatcgatttgcaacgaatgttgttcaatgttgcaaactgataaccttttattttcacttgggagaaagggggtgatcgaggtatatctttttctcctttcgctatacatcctaaggagtatttcggcgtgaaattttgatttatttcacatagagttagtggttttttatttatttaatgattttaagttttttaattaatgtaattacgaaatgactcgcaggtttaagtgatttaattgatttaatgaataaaatttgccacgatcataattaatatctatgtattttgattcaacattttaattacatccgtcaaagaggctcgggacaacccgcaaggaaaacaatgttgcagcttaacgagaataaacagtttgcatttttccaaagactggcatttccgctgcgtatctttttgctgattctggtgttcagtatatttgtcattgcagccctggcgcaatattttacggccagttttgaggactatttaacgcttcatgtacgcgacatggcaatgaatcaggcgaaaattattgcctccaatgacagtgtcatctctgcggtgaaaacgcgtgactacaaacggctggcgaccatcgctaacaaattacaaagagataccgattttgattatgtggtgattggggaccggcacagcatccgcctttaccatcctaatccggagaaaattggttatcctatgcagttcaccaaacagggcgcgctggagaaaggggagagctacttcattaccgggaaagggagtatggggatggcgatgcgcgccaaaacgccaatctttgatgacgatggaaaagtcatcggcgtggtgagcattggctacctggtgagtaaaatcgatagctggcgggctgagtttttattaccgatggcaggtgtgtttgtcgtgctgttagggattctgatgttgctgagctggttcctggccgcgcatatccgtcggcagatgatgggcatggagccaaagcaaatcgcacgcgtggtccgtcagcaagaggcgctgtttagtagcgtttatgaagggctgattgcggtggatccgcatggttacattaccgccatcaatcgtaacgcaagaaagatgctggggctgagttcccccggacggcaatggttgggtaaacccattgttgaagtggtcaggcccgccgatttctttaccgaacagattgatgaaaaacgtcaggatgtggtggcgaactttaacggtctgagcgttattgccaaccgggaagctattcgtagtggtgatgatttgctgggggccattatcagctttcgtagtaaagacgaaatttccaccctcaatgcgcaactgacgcaaataaaacaatacgttgagagccttcgtacattgcgacacgagcatctcaattggatgagcacgctcaatggtctgttgcagatgaaagagtatgatcgcgtgctggcgatggtgcagggggagtctcaggcccagcaacagcttattgacagcctgcgcgaggcgtttgccgatcgccaggtggcggggctgctttttggtaaagtgcagcgcgcccgggaactggggctaaaaatgatcattgtccccggtagccagcttagccaactgccgccaggactggatagcaccgagtttgcagccattgtgggcaatttacttgataacgccttcgaagccagcctgcgtagcgatgaaggaaacaagatcgttgaattattcctcagcgatgaaggcgatgatgtggtgattgaagtcgccgatcagggctgcggcgttccagagtctctacgagacaaaatatttgagcagggggtcagtacgcgtgctgacgagcccggtgaacatggcattgggttgtacttgattgccagctacgtaacgcgctgcggtggtgttatcactctcgaagataatgatccctgcggtaccttatttagtatctatattccgaaagtgaaacctaatgacagctccattaaccctattgatcgttgaggacgaaacgccgctggcagagatgcatgcggaatatattcgtcacattcccggattcagtcagatattactggcgggaaatctggcgcaggcccgaatgatgatcgagcgttttaagccggggctaatcttgctcgataactatcttcctgacggtagagggattaatttactgcatgaactggtgcaggcgcattatcccggcgacgtggtgtttaccactgcagccagcgatatggaaacggtgtctgaagccgtacgttgtggtgtatttgattatctcattaagcccattgcctatgaacggctggggcaaacgctaacccgtttccgccagcgtaaacatatgctggaaagtattgatagcgccagccagaagcaaattgatgagatgtttaatgcttatgctcgcggtgaacctaaggacgagctaccgaccggcattgaccccttgacgctaaacgcggtgcgaaaactgtttaaagagcctggtgtgcaacatacggcagaaacggtggcgcaggcactgaccatcagccgcaccactgccaggcgttatcttgaatattgcgccagccgccatctgattattgctgaaattgttcacggcaaagttggcagaccacaacgcatataccacagtgggtgacatgataaagccggaggaaacttgcctccggcattactatttacttgcctgtgaccgctgctgccgttcctggcaccatcagctctgtagcaacgataacaatcaccaaaccaacaagcaccggtacgctggtgcgttttacgacttcaaacgggctgatcttcgccatcccggcaaccgcaacgactacgccagaaacggggctaagggtacggccaaggttactcgcctgcagcatcgggatagtcaaatacgccgggttaatgccggaagagtgcgccagtttcgggatcatctcaacaaacgcataaaacggcgcattgccactaccggtcgtgactgccgccagcattgtcagaatcaccaataccagcatcaggatgatactcgcgctaccaaagctggtagcgatagaaatcagactttgaataaagccgatggtgctaagcccctgagcgaataccccagcggcaaccagcagcatcaccacgttagcaaacgcatctgccatcccgcgataagccacttccagaccagagaaaactttctgggtattaaagctgcggaggaactccagaatggaggcaatcagcatacaaatcaccagaatagtgatgatgtgtaattgcggaccccatttaccgtcaaaaatcagtacaccgatgatcggcgtgaacggcaaaatggcataaaacgcaggagcagtggtggtgatttcactgacatctaacatttcatgagagatgtgctcttttttatccagataacgttgccagaagaagtgggcgatcgccatgccgataattgcagcaatactgataggcagcgtcgttttgaaggcgaagtcaatcaggctcatttcggaagcttgcgccgccagcaccacatccccactagtcggtgcgagaataatcgccgccggggaggcacaaatggcagcagctgcgccacgactgataccaacgtttaccatcaccggaaatagggttgccatcagcaaaacacccagaccggttgcggaagagacggccagagacatcagacaggcgacaaaataggcggcaatcatcagcaggtaaggggagttaatatactgcaatggtttactcgccagcttgaccaccatatcattcgcgccgatatgggtcatgtaagcggcaaatccacacagcatcataatcatcatgccgaggtcgccgccgcggctcattagtaatattttaacgtattcaacgatatccgtggcgctgtagcctgtactagcctggctggacggtaacactttgtgccccataatggcactgataatcagcaataacaggccaccgacaaataacacaccagtggcggaataccctttaatgatgtagcgagctacacccacaataaccacaaccccaataaggagctcaatgaatgtcagcataatttttcctgtctccaggccccaaagtaaataataaaaaattcctaaagcttaaggaaaaaatatgcccaataaattggcgatgaatgctgattaaaatcaagaaaaactgccattaagacattgaagttgctgtttttatacatagataacaaaacgcatatttagcggttggcaattatcacataataatgtgtgcaaattgatggtggattgatgcaaatttgttaattgcaatggtgttagctgcggctgtgcgctcaaaaaataatctaatatgagcataggttgacgatatatattatatacttcgttaagatgattgttgtatctcgttaaaaaataaaataatttttccttgattgcattttgtcatcaaaaaagacttggtttttcttttttgactattcccatcgcagaaaacgacgcatcatctttaatcgatgcgcggaaatatttaacttgaacaagcggaaataaatagagcagctattcagattattctttatgttgggtctattaaggttatgttaattgtagctttgctatgctagtagtagatttttgataaatgttttatggtcacaaatgaacgtgagtaaatatgtcgctatcttttcctttgtttttattcagttaatcagcgttggtaaagtttttgctaacgcagatgagtggatgacaacgtttagagaaaatattgcacaaacctggcaacagcctgaacattatgatttatatattcctgccatcacctggcatgcacgtttcgcttacgacaaagaaaaaaccgatcgctataacgagcgaccgtggggtggcggttttggcctgagccgttgggatgaaaaaggaaactggcatggcctgtatgccatggcatttaaggacagctggaacaaatgggaaccgattgccggatacggatgggaaagtacctggcgaccgctggcggatgaaaattttcatttaggtctgggattcaccgctggcgtaacggcacgcgataactggaattacatccctctcccggttctactgccattggcctccgtgggttatggcccagtgacttttcagatgacctacattccgggtacctacaacaatggcaatgtgtactttgcctggatgcgctttcagttttgagacaaatgaagttttagtaacttctttaaaatcaatagctaaaataagtaacatcaaaaataacgcgacttttatcactttttagtaaagttacactggacaaagcgtaccacaattggtgtactggtaaccgacacagcatttgtgtctatttttcatgtaaaggtaattttgatgtctaagattaaaggtaacgttaagtggtttaatgagtccaaaggattcggtttcattactccggaagacggcagcaaagacgtgttcgtacacttctctgcaatccagactaatggttttaaaactcttgctgaaggtcagcgcgtagagttcgaaatcactaacggtgccaaaggcccttctgctgcaaacgtaatcgctctgtaagatacgtcagcaagaattcaaaacccgcttaatcagcgggttttttttggtctttagtgtgcggtactggcgctaaacagccagaatgccagtgcggtcatggcaaaagaccccagaaggttgacgaaaacgttcagtaatgcccagccaaagcggccctcttgtaacaaaaacaccacttctgcgctaaatgtactgaaggttgttagaccgccacaaaatccggtggtgattaatactttccacactggatcaatgttcgtcatcctgctgaaccatgcgaatcctattcctatgatgaatgccccaatcaggtttgctgtcagcgtccccaacggaatcgcctgatgcagtgggttaaatcgcatacttaacagccatctcgccacgcttcccgtaccaccgccaataaaaactgctaaaagaagttgtaacactgcaaaatcctgctatttgatttgtatgagtgataagtgtaacgccgaataatcgtcgttggcgaattttacgactctgacaggaggtggcaatgctggttgccgcaggacagtttgctgttacatctgtgtgggaaaagaacgctgagatttgtgccagcttgatggcgcaggcggcggaaaacgacgcaagcctgtttgccctgccggaagcattgctggcgcgcgatgatcatgatgcagatctaagcgttaaaagtgcacagctgctggaaggcgaattcctcggactttacggcgagaaagtaaacgtaacatgatgacgacaattctgacgattcatgttcctagtacgccggggcgcgcatggaatatgctggtggcacttcaggcaggaaacatcgtcgcccgttatgccaaactgcatctctatgatgcatttgccattcaggaaagtcgccgtgttgatgctggtaatgaaatcgctccgttactggaggtggaagggatgaaggtcggtctgatgacctgttatgacttacgctttccagagctggcgctggcacaggcattacagggagctgaaatcctggtacttcctgccgcctgggttcgcgggccgctcaaagagcatcactggagtacgttgcttgccgctcgtgcgctggataccacctgttatatggtggcggcgggggagtgcgggaacaaaaatatcggtcaaagccggattatagatccctttggcgtcaccattgcggcagcgagtgaaatgcctgcactcattatggcggaagtgacgcccgaacgtgtgcgtcaggtgcgcgcgcaactgcccgtcttaaacaaccgtcgctttgcgccgccgcaattattatgatgtttttttactcggcgcttgattcaccttgttacagattgctattgtgtgcgcgcgtcgaatgaccgttaatattctctggtttttaaggcgcgttctgttgccggttatatgtcaagaaggtatctatgggtgagattagtattaccaaactgctggtagttgcggcgctggtcgttctgctgtttgggactaagaagttacgtacgctgggcggagaccttggagcggccattaaagggttcaagaaggcgatgaatgatgacgatgctgcggcgaaaaaaggcgcagacgttgatcttcaggctgaaaagctctctcataaagagtgacgtggcgagcaggacgctccctcaatatcttgttcgatacaaaaaacccgcttcaaaaagcgggttttttatcagacagatgtaagtaattattacaggattacttaacttccatccctttcgcctgcaaatcggcgtggtaagaagagcggacaaacggaccgcatgcagcatgggtaaagcccatcgccagcgcttcggctttcatttcgtcgaactcatccgggctaacgtaacgttgaaccggcaggtgatggcggcttggctgcaaatattgccccagcgttaacatcgtcacaccatgacggcgcaggtcgcgcattacctcaataatttcttcattggtttcacccagtcccaccatcagaccagacttggtcgggatttccggatgcgcttctttaaagcgttccagcagcttcaggctccagttgtaatctgcaccaggccgtacctgacggtaaatacgcggtacgttttccaggttatggttgaacacatctggtggcgttgcagtcagaatatccagagcacgatccatacgaccgcggaaatccggcaccagagtttcaattttgatttgcgggcttttttcccgaatggcagtaatgcaatccgcaaagtgctgggcaccgccatcgcgcaggtcatcacggtcaacggaggtgataaccacataacgcagcgccatatcggcaatggtctgcgccagtttcactggttcattggcatcaggagctaccgggcgaccgtgggcaacatcacagaacggacaacggcgggtacaaatagcgccgaggatcataaacgttgctgtgccgtggttgaagcattccgccaggttagggcaggaggcttcctcgcagacagaatgcaggccatttttgcgcattgcggctttgatgccctggatacgtgtagagtccgctggaagcttgattttcatccattccggcttgcgcagcagggcttcgcgctctgttgccacgtttttaaccgggataagggccatcttatcggcatcgcggtatttaacaccgcgttccatcacaatgggtttactcatagcgtgcgtgttccagttgcgaattacgaaggaaagcgtttcaattcaatagattgttgtaattatcaactatttttgaattaacgactggcagtatatcattgaaacggacctgaaagcagccaaagcggtcgcgaaaatgtaaaattgttgttggattgtgccattttatcgttctgcgctgtgatctggctgtaacaatactttttcaaaatgcattacggataacatctattactccgtgcaggatgggatcacgcaggctgaatttgttgtagtggatagagaaatctatttgctcctcatttaaggacggaaaaggcagtttttccagcggccagcagcggctaaacaggttataaaaacggctgggaataatcgctaacatgtcactgttggcaaccagtgcagcgattgtcaaaatgttgtagctggtgaaattgatttgccggtccggaaacatttcttgaactctctgccgcagaccgctgaaattttgctcttccggtaacagaagtacatgcgcagcgttgtcgatagtctctctgtcatcttctaaagagagtagtggatttccctcgcggcaaattaacaccatattgtcggtgaacagaacatgatgttgcaccgtacgattggtgcaaaacatgttatcgatgatgagatcggtttgaaactgactgagttggttttccgcgtcgctgatgggcgggttgcgcagtaaaagctgcggatagtgagttttaatcgcccgatagatgacaggaaggaccagtgctccgacgctgggagtggtcgcaatagttatcgttcgttgcttatcatagcttccttcgatatccagcgcgccaagaatggactcaaggccctgactgatatactcatgtagatgcatcgcaaatgcggtaggagtgacaccctggcctttgcgaataaacaatgggtcagggaatataacgcgcagtttctgaatagactgactgattgcgctgggggtcagattaagcactttcgctgcattaacgatccctttatgtacatatacagcttcaaaaatagtcagaaggttaagatcaatatttcgtaaggttgtaaatatttgtggtttaccttcactgctctttctgcttaaacagggttcaatttgattattactatccacgcacttactccaattttattcatggaaaaataatatttaaaaaattacaataatcttatgtctaattggaacggaacgcttttgctcaccataatcaactatttcaataggttaatcaatggggtgagttacggagcaaggcgtggcaccgcatttctgcaagtgataaagaaaatatacaaacgcgaaggagatgtaaagcattagcagatattatgagtaatgacccagtgtaaattgggccattgatgtatggaattaagcggtaatatattcgaagtccggattgtttagtagcgctaaaatattttccagtaaacgtggagcaatattattagtcgtcgcttcgggtttccattgacttattttagccatttccattccggcatacccacaaggattaatacgtaaaaatggactaagatccatattgacgtttaatgccagaccgtggaaactacaaccgcgtcgaatacgtaaacccagactgcaaattttcttttccccaacatagacacctggcgcgtcagcccgaggatgcgcttctatacccagttcagccagggtattcaccactgtttgctcaagcaaggtcaccagttcacgcacaccgagtttacggcgtttcaggttaagcaacacatacatcacctgttgccccggcccgtgataagtcacctgcccaccgcgatcgctctggatcaccggaatatcacccggcattaaaatgtgctccgcttttcctgcctgaccttgggtgaataccggatagtgctcgaccagccagatttcatcaagggtactatcatcgcgggtatcggtgaattcatgcatagcctgggagattggctcgtaaggctgaagaccgagctggcggacaagaattttatcctgatacaaaacggcatctccgtggagaatgagtaaaagtgggggaaaagtatatcacagcgaggagaggggagttacccgaccaggagccgggtaacggagaagcgagttacagaaccatgcggacaatatcgattttgcccagttcttcatacagtgtttcaacctgctcgatatgagtggcgttgatagtgatagatacgctgtggtagttgcctttgctgcttggttttaccgttggggtgtagtcacctggcgcatggcgctgtaccacttcaaccacctgatcaaccagctcaggtaacgcctgccccataactttgtaagtaaaaggagtagggaattcaagcagttcgttaagtttggttttcatgtcagctccggcgtaacgtaattaaatagcaactcccgccagaaggcgggagttttttactgatgcttagtatatggggacggaaattacactttcaagtgtttaatttttaaccaaaccagtgatggaacattaatttaatgtaatcaatgattttgccgaagaagttaccttccgggatttcttgcaacacaaccagcgggcgttgctcgatcgttttgccatcaagctggaagttgatagttccgacgacctgattcttttgcagcggcgcatgcaattcactgctgttcagcacatagctggctttcagatctttcatgcgaccacgcggaatggtcaggtacacgtctttatcaacccctaagctagcgcgatcagaatcaccaaaccaaaccggttcagaggcgaactctttacctactttcagtgggttaacggtttcaaagaaacggaagccccaggttagcagttttttactttcggcttcacggcctttaaaagtacgtccgcccattaccgcagaaatcaagcgcatctggccttcagtcgcagaagcaacaaggttgtaacctgctttgtcagtgtgtccggttttgatgccgtcgacattcaggctgttatcccataacaggccgttacggttcagctggcgaataccgttaaacgtaaattctttttctttatagatgctgtattcattcggtacgtcacggatcaatgcctggccgatcagcgccatatctcgcgcggagctgtactgaccatcagcatccagaccatgtaccgtctggaagtgggtatttttcaggcccagtgcgttaacgtagctgttcatcaagccaacaaaagcgtcctggctaccagcggcaaaatcggccatggcgacacaagcatcgttaccgctttgcaggttaataccgcggatcagctgagaaaccggaacctgcatgcccggtttgaggaacatcaggctagaacctttaaacaccgggttaccggtggcccatgcgtcgttgccgatagtgactaaatcagtttctttaaatttaccggctttcattgcctggccgataacgtaactggtcatcattttggtcaggctggcaggatcgcggcggacatctgcgttctgttcggcgagcactttgccggagttatagtcaatcaggatgtaggactccgcatcgatctgcggtacacccgggatcatagttttgatattcaggtcatcggcatgtgcagcagagataaaggctgtgcaaagagccgtggtgagcgccaggcgcttcatgatacgagcggaaaaaatggtattcatggtctgaactacgacatccgtgatggaattaaaaaagtgccctactatagcaaatgcactaccggcaggcatctgactttccgcgtgactttgttaacgtcatttacagaaattgacacatcagatgcctgctttacgttactgcgcggtagtaataaaactctgtaattgggcttcggtttgcaaacgttgctgcaaggtactggcttcggctttgctggcgaatgggccaagctggatccgccagaccgcgccattttgagttacgcgaccggggacgccgaacttctgtcccagttgctgttggtactgttgcgcacgagcctgatcgcttacggccccgacttgcaccataaagttgccgctggcgctttggctgacggcttgcggtgtcaccattgcagggctggttgcaggcgttgtgctcggagctgtaacaacgggctgtggcgcaggcgtcggttcgctgccttccagtacaccaggcgctaaggtcgttggtgcgccgaggaaaccgctactggttaccggcgcgccggtcggatcttcgctttttagcgtgctattactgaccggaagaatgtcaccctgcgggccagacacactacttgttcccgcgccaccgcttaaatcgggaggtgcaggcagggcgtaagtctgtttggcgactgtggtacaagccataccaggaccagaaaggctaccatcctgggcaacaataatcggatcgatacgaactttggtgttgttactcgtgttaagacggtcagctgccgcgcgagaaagactaataacgcggtcgttgccgtaagggccgcgatcattaatgcgcaccacgatcattcgcccgttagccaggttagtgattctggcgtagctggggatcggaagcgttggatgggctgccgtcagctgtgtcggatcgaatgcttcgccagaggccgtcaggttactgccgggttcggcatcatagattgccgccagtcccgcctggctaaatcgagacggatcctgcacgattttgtagcttttaccgtcgcgctggtaatcctgatttgccgtcgcgttcagtggttcgaaacgcgggtccgccccgctaatttcaactatagggccgttacataccgcaggctgcggtacacttaccgtctgttgctgaccatcatcgcttgtacatgccgcgagcattcctgccgcgatgcagatcccgagccactgcttacgcattgcgcacctcttacacgcttttgctcaacattttcctgtgggtgtggatactcattacaatcccgaacccagccatcagcacaattagcgcgcttcctccataactgaccagtgggagcggaacccctacaaccggcagaataccgcttaccataccaatatttacgaagacataaacgaataatatcagcattaagccgccagccatgacgcgaccaaaggtggtttgcgctctggcggctatccacagcccgcgcatgatcagcagaatgtagagagcgagcagaatcagaatgcccactaatcccagctcttccgccagtaccgcgaagataaagtcagtatggcgttcggggagaaattcaagctgactctgagtgccgtgcagccagcctttgccgcgtaatccgccggagccaatagcaattttagactgaataatgtgatagcccgcgccgagtgggtcactttccgggtccaggagcatcattacgcgctggcgctggtaatcatgcatcaggaagaaccacagaatcggaatgaacgccgctaccagcactactgcgacgccaatcagacgccagctaaggccagagaggaacagtacaaacagaccggaaagcgcaacgaggatacttgttcccaggtcaggctgtgcagccaccagcagcgtgggcataaatatcagcaccagcgcgatgccagtgttcttcaagcttggcgggcaaacgtcgcggttgataaagcgcgcaaccatcagtggtacggctattttggcaatttcgctcggctgaaaacgaacaataccgaggtccagccagcgttgagcacctttagagatggcaccgaaagcatctaccgccaccagcaaaataatacagatgatatagagatagggggcccagccttcataaacgcgtggaggaatttgcgccatcaccaccatgatgaccagacccatcgcgatttggccgattttacgctccatcatgccaatatcctgaccgctggcgctccagataaccagggcgctgtaaaccagcaatgccagtaagatcagcagcattgtgggatcgagatggactttatcccagaatgtttttttattcggattatccgtcatgattaatggtcctccgctgcggcaaccgctggattttccgcaggcagatcggtgttgttatcacccagcataatgtggtcgaggatctggcgcatcagtgtaccaaccgccggacccgcaccaccgttctccagaatcatggcgacagccacttgcggattgttgtatggcgcaaaggcggtcatcagtttgtggtcacgtaaacgctcggcaattttgtgcgcattataggtttcgttcgctttcagaccgaagacctgagcggtaccggatttcgccgcaattttgtacggtgcgctagcaaagtatttatgcgccgtaccgttagggcggttagcaacaccgtacataccgtctttcgccagctcccagtaaccggaatgaatatcgccgacgggcggttcatgcggctgtacccatggcacctgtttgccgtcttcggcggtgctcatcagcaaatgaggaaccttcacgataccgtcattaatcaggatcatcagtgccttactcatctggattggggtcgctgtccagtaaccctgaccgataccaaccggaatggtgtcaccctgataccacggttttttaaagcgtttctgtttccattcgcgggtaggcatgttgccggaacgttcttccgccaggtcgataccggtgtaatgaccataaccgaatttacccatccattcggagaggcgatcgatccccatatcgtaggccacctgatagaagaaggtatccgcagattcttccaggcttcttgtgacattcagacgcccgtggccccattttttccagtcacgataacgtttttcgctacctggcagttgccaccagcctgggtcaaacagcgtcgtattgcgcgtgatcaccccggcgctcaatgcgctaaccgccacatagggtttaactgtagacgcgggaggataaaccccctgtgtggcgcggttcaccagcggtgtattcggatcgttcaacaaggcggaataatctttgctggagataccgtcaacaaacaagtttgggtcataactaggcgtggaaaccagcgccagcaccccacctgtacgcggatcggtgactaccacagctgcgcggctacccgccagcagcgtttcaatatattgctggagtttgagatccagcgtcaggtaaatatcgtgtccggcttgcggtggtacttcttttaactggcgaataacacgcccacggttgttaacttcaacctcttcataaccggtctgaccgtgcagcacatcttcatagtaacgctcaatgcccagcttaccgatatcatgcgttgccgcatagttggccagtttgccgtcattattcaggcgttcgacgtctttatcgttgattttgctcacatagccgatgacgtgggtcaacgcgctaccgtaaggatagtaacgacgtttatagcctttaacttcgacacccggaaaacggtactgattgacggcaaagcgagctacttgtacttcggtcaggttagttttcaccggaatagaggtgaaacggtgactacgtgcgcgctcttttcggaatgcagcaatatcgtcatcggtcagatctaccacgctgcgcaaagcgtccagcgtttgctgcacgttatcgactttctccggcatcatttctatctggtagatagtgcggttgagggccagagggataccgttacgatcgtagataatgccgcggctgggcgcgataggcaccagcttaatgcggttttcattagagcgggtctggtagtcggtaaagcgaacaatttgcagattatacaggttggcgataagcacgccggtcagcagcaaaatccccaaaaaggcgaccagcgcccggcgcacaaacagcgcggactctgccgtatagtcgcgaaaagagttctgtagtttcatccgctgcgttttctactcaaagctcccttatcactcacggtgataaggatggttggtggtgatgctccacgcccggtacagactctctgcgaccagcacgcgaaccagcggatgggggagggtaagcgcgctcaggctccagctctgctcagccgccgctttacaggcagggctcaacccttcaggcccgccaatcagtagactgacgtcgcgaccatccagcttccagcgttccagctcagcggctaactgcggcgtatcccagggcttgcctggaatatcgagggtgacaatgcggtttttgcctgcggccgccaacatctgctcaccctctttgtcgagtatgcgcttgatgtccgcattcttgccgcgttttccggccggaatttcaatcagctcgaagggcatatctttcggaaaacgacgcaggtactcggtaaaaccggtttgtacccagtccggcattttcgttcccacggcgacaagttgcagcttcacgcattaactccagagtttttccagttcatacaggcgacggctctcttcctgcatgacatggacaatcacatcgcccaaatccacgacaatccagtcggcgctgttttcaccttctacgccgagcggtaacaggcccgctgcgcgagactcctgcacaacgtggtcagcaatggacataacatgacggctggacgtacccgtacagatgatcatgcagtcggtgatgctggatttgccctgaacgtctaaggcgatgatgtcctgacctttgaggtcatcaattttgtcgataacaaaatcctggagtgctttaccctgcaagttttccccctgggtgaatcaaatagataaaaatggtctgtcagtatacctgaaccagaggcgatttcgggacaattgtcgccgaatcggctttcgaaagtgggctatcatcccaccccgcgccgcagattgcatcgccatttttgtaaaacaatttctacaaagtcgtgtctggcggaaaaagtctggctgcggagaatatcagcctgcccgggtctgtcaatggtcgttgcggcttacccgtaaaaaaacagaaaagtcatgcattctcgaccccgatggcacggctattgaggacgcgtagcgtcgcgaatttttggttgatatcaatggcgctccaacacccctggtcaacgcgaaaatgccacatagcttcggcaggcatgccaattaaacgggcgattaacagactcagtacaccctgatggctgacgactaaaatattctgatagtgctgaaattcactaagccttgcgataaagcgttccacacgttggctaaatgcctgaaatccttcaccgttcgtggggattgcatgctgccagtcattgcaccacgcgctatagttttcggcatcttcttgcatgaggtcgcgatgatgtcgcatctcccagtcgccaaaaaacatttcgttgagttcaggtatgatttgcacggggagctggcggtcactgagaaccagtcgcgcggtatgctgtgcccgttccagttcactgcataaaaccagatcaaaggaaacaccatgtagcagcgtatgcagattttgcgcttgctcaataccgcgcgcggtcaggggggtgggcgcatgaccgctgtaaagaccatcgatattcgcttgcgtttcaccatgacgaattaaccacagtcgcatcatgccctccgtaacgacaggtatcagcgatacaagccttgttggttaatgtaagtcagtaccggttccggcaataaatcctcacaactttcaccgttttgcaaacgttcgcggatgatggtcgcgctgatgttaaaccacggcgtttcagccagataaattttaccggcaggctgaaggtgaagatcttccgggttatgtgtcaaatgatcttccagccattgctggtattgcggttgcgccatttcaagtgggtaacctggacgccgacagacgatcaaatgtgcattgtcgagtatcgtttcgtattcgtaccaggtcggaaaggtcagcagactatcctgaccaataataaacgccagcggcacgtccggtccttgttcctgccgccactctttcagtgtttgcgcagtgtaagagggggcattgcgctttagctcgcgttcatcaagagtaaataatggcttgtcggcaatcgccagttcaagcatgtgtttacgctgcacgctgttcgcttccggctggggacgatgcggaggaacattattagggatgattgtgacccgcgtcagaccaatcaaattcgccagcgtttccacgggttttagatgaccatagtgcaccggatcaaaggtgccgccaaacagagcctgtaaagatttcatatcaaccgtcgataaatacgtccgccaggggtttatggcacaacagaagagataacccttccagctctgcccacacactctgaccgtaatcttgtttgagggtgagttccgttcgtgtcaggagttgcacggcctgacgtaactgcgtctgacttaagcgatttaacgcctcgcccatcatgccccggcggttctgccatacccgatgcttatcaaacaacgcacgcagtggcgtatgggcagactggcgtttcaggttaaccagtaacaacagttcacgttgtaatgtgcgcaacaaaataaccggttcgctgccttccagacgcagttgctgaagaatatgcaatgcgcgcttactttttcccatcaacaaagcatcaacccaatgaaaaggggtgaaatgcgcggcatcattcaccgcctgttcaacgcgcggtaatgtcaatttgccgtctggccagagcaggcttaaacgctccagtgcctgagccagcgccagcaggttaccttcataacagtagcagagcacctgatttgccgcgtcatccagttctaagttgagctgttttgcgcgcgcagcaacccagcggggaagctgagcctgctccggtgtctgacaggtcacctgcacgctgcgattcgcaagcgcagtaaaccaggcggcattttcttgcgctttgcttaatttattaccgcggacgatcaacagcaggtcgtcatgcagaagtccggtgagtgtgagaagttgctcattgatcgccgcattcggtccgttttctggtaacaacagcaatagcgtttgtcgactggcaaacagactcatagcctggcataagctaaagatcgcattccagtcagtgttgggatcaatggaaaaagtgtggtgttcttcgaatccttgtgccgcagctacctgacgaacagcgtcctggctttcctgcaataacagaggatcgttaccaagtaaaagatacgccgcgcgcagcccttcattgagctgcgcgcggagttgttccgggtacaaccgaatcatcagttacccagcgtggtggagacgcgtgcaggcgttgccggagtatccgttgtggtgctcgtctgttcttcgtcggaacgaatatccgcagcacggatgcttggcagcttacgaatcagctgttcggcagcacggtcgtacatctcttttacgatcatgtcttgttcgttatctttcgctaacgccatttgcgggttatcgaagaagctacggaagactttggcgctaatcgggtagatatcacggccggggatcaacacggtcgcattaaccgtcatgatcatctgatactctgctgtttgaccgttacggaatacgcttgcggtatctttcgcgatgctcactttacccaaacgcaaggatggaacgtccttacgcgtggtttctttatcaagcaactcgacaccattcagacgtaactggttacgcaccgcacggcttaatggcccgttcggatcgccactgtccaggatcatgaccttcatagtggaaggaacctgcgtggtatcacgcagatgccagccacacccggcggtgattaacaccgccagagataacaacaatgttgccagatatcgcacgcttcctcccgcgcttagccaacgaccagattgaggagtttacctggtacgtaaatcactttacgtacagtaacgccatcaagatattttgctaccagatgttcctggccagcacgttcgcgaacctgttcttccgttgcgtccaccggaacggtgattttggcacggactttaccgttaacctgcaccacgaccagcgtggagtcttccaccatcgctttttcgtcagcaaccggccacggcgcgttgtcgatatcgccttcgcctttcagttcctgccacagcgtgaagcagatgtgcggggtgaacgggttaagcatacggacaacggccagcagtgcttcctgcatcagagcgcgatcctgctcgccatcggttggtgctttcgccagtttgttcatcagctccataatcgccgcaattgcggtgttgaaggtctgacgacggccgatatcatcggtcactttagcgatcgttttatgcacatcgcgacgcagcgctttctgattttcagtcagcgcatcaacgttcagtgccgcaacatcaccttttgctgtgtgctcgtaaaccagtttccagacacgtttcaggaagcggttagccccttccacaccggattcctgccattcgagagtcatatcagccggagaagcaaacatcataaacagacgaacggtgtccgcgccgtaacgttcaaccatcacctgcgggtcgataccgttgttcttgctcttggacattttgctcatgccggtataaaccagttcatggcctgccgcatctttcgctttcacgatacggcctttctcgtcacgttcaacgatagcatcaaccggggaaacccagttacgttcgccgttttcgccaacatagtagaaggcatctgccagcaccataccctgacacagcaactgtttcgctggttcgtcagagttcaccatgcctgcatcacgcatcagtttgtggaagaagcggaagtagagcaggtgcataatggcgtgttcaataccaccaatgtagatatccaccggcagccagtagttagccgcttcggaatccagcataccttctttgtactgcgggcaagtgtagcgcgcatagtaccaggaggactccataaaggtgtcgaaagtgtcggtttcacgcagtgctggcataccgttaacggtagttttcgcccactccggatctgctttaatcgggctggtaatgccgtccattaccacatcttccggcaggatcaccggcagctggtcgtccggggtcggcattacggtaccgtcttccagcgtcaccatcggaatcggcgcgccccagtaacgctgacgggaaacaccccagtcgcgcaggcggtagttcactttacgctcgccaacgcccatcgcagtcagtttatcggcgatggcgttgaaggccgcttcatggtcaagaccgttgaactcgccagagttgaacagcacgcctttttcagtcagggcttgctgagaaagatctggctcagagccgtcagctgccaggataaccggtttgatgttcaggccgtatttagaggcaaactcgtagtcgcgctggtcgtgccccggtaccgccataactgcgcccgtgccgtactccatcaatacgaagtttgctgcccaaacgggaatttcttcgcccgttaatgggtgaaccgctttaaagccagtatcgacgccttttttctccatcgtcgccatttcagcttcggcaactttggtgttacggcattcgtcaataaaggccgccagttcaggattattttccgccgctttctgcgccagcggatgacccgcagctaccgccaggtaggtacaacccataaaggtgtccgggcgggtagtgtaaacggtcagcgtgttgtcatagtcgttaacgttgaaggtgatctccacgccttcggaacgaccgatccagttacgctgcatggttttaacggtgtctggccagtgatccagtttatccagatcgttgagcagctcgtcagcgtaagcagtgattttgataaaccactgcgggatctctttacgttcaactttggtatcgcagcgccagcagcagccgtcgataacttgttcgttcgccagtacggtctggtcgttcgggcaccagttgaccgcagaagtcttcttatataccaggccttttttatacagctcggtgaagaatttctgttcccaacggtagtattccggcgtacaggttgccagctcgcggctccagtcataaccaaagcccagcattttgagctggtttttcatatacgcgatgttgtcgtacgtccacggtgccggagcggtgttgtttttcaccgccgcgccttccgcaggcagaccaaacgcgtcccagccgatcggctgcaggacgtttttgcccagcatacgctggtagcgggcgatcacgtcaccgatggtgtagttacgtacgtggcccatgtgtagtcgaccagaaggatagggaagcatagacaggcagtaatacttctctttgctctcgtcttcggttacttcaaatgtgcgcttctcatcccaatgaagctgtactttggattctatctcttccgggcggtattgctcttgcatggcagccagtggtcctgttttcaatacggctacaaatgtagcgttgaggtggtttttcagatccgcatagcatagcccaaacgtccgcgtcaaaacagcctttcgcgcactcgacgttgaaatgatgcccggattattcatacattaatttacagagtttgtgggcgtattagcaaagcaaggaacaaagaacgtctattattatagtcagttaacgacccgggagatgaaacgatgaacaaggttgctcaatattaccgtgaactggttgcgagtctgagcgaacgcctgcgcaatggcgaacgtgatatcgacgcactggtggaacaggcgcgcgagcgcgtaataaaaacaggggagttaacgcgaaccgaggtcgatgagctgacgcgagctgtcagacgtgacctggaagagttcgccatgagctatgaagagagcctgaaagaagaatctgacagcgtctttatgcgggtgattaaagaaagcttgtggcaggagctggcagacatcaccgataaaacgcagcttgaatggcgcgaagttttccaggacctcaatcatcatggggtttatcacagcggagaagtggtcgggctgggaaatctggtctgcgagaaatgtcacttccatctcccgatctacacaccggaagtgctgacgctatgcccgaaatgtggtcatgaccagttccagagacgcccgtttgagccgtaatagtctgatttcgcacagcaataaagagaatatgggccgaatgaaattccccggcccttgtttttatctttacagtaaatcttcagtctcacgaatttcctgactgacatctctggttccggaactctgaactttacgatacaggtcgagagcctgtcggagatcgacaggtcttccttctccgtagtgatacataatggccaggttataccaggcagtggcgtcattgcattcagcggctttcgtaaaccattcaaaggcagcctgataatctttctcaacgccttgtccgtgtttatacatataaccgatgttgacgtaagcgccgacgctcccctgagcggcagccttcagataccagtacatcgcttgcttatagtcctggtccaccccttcgccagcgttataatcccatgcaatttgaaactgggcgtgccgattaccctgctgtgcgcttttcaaataccagaatgcggcgagtgtcttgttttgagcaacgccttttccgtcttcataaagatcggccagattgttttgcgcgtcactatggccttgtaatgcagcttgtttgtaccagaaaaatgccagcgcatagtcttttgcgactccgttgccatttctgtacatccacccaagattattttgcgcataagacattccgctctccgcggctatctgataccagacaaccgcttctttataattgggggcttctccacgatccagtgtccagccaagggcgttggaagcgaaagtatggccttgtagggcagcttttttcagccagaagatggcttgctcattatctttatgacggcttttatcctcggtatacttttgccctaaggaatactgtgcttcacaatgaccttgctcagcggccagcttcagccagtaaaaggctttttcgtcgtccggagaatcaattgcgctatcgcgattataataaaacccaacaatatattgagcctcgcaatcgcctttttcagcacgttcgataatctcatctatacttaaattatcgcagcaactactcgtgaaaatcattatcatttccttatggttgcagataaaacatattatatttttatgtgttccatttttgcgtaagccttattttatgcgtattatgtcgcgtcagaaaagtataaataaacgagcctcgcaatgcggctaatattcatttaatgaatatttaaggataaattatatggacatggagagccaaaaaatattgtttgcactttccactccgatggaaatacgcaatgaatgctgtttacctagccatagtagtcccaaaatgtatttaggtacatgcttttttgacctttcttccagttggggaattgatgaccgtgatgacctgctgcgcacaattcaccgaatgatcgataacggtcatgccgctcggttggcagggttttatcaccgctggtttcgttatagcccatgtgaatggcgtgactatcttgctgaactaaatgagcaaggtcaggcttatgcgcaatttgtcgccagcaccgccgaatgctgtggcgaagggggaatcaaagcctgggattatgtccggatgggttttttaagccgaatgggcgtacttaataactggttgagcgaagaagaaagtctatggatccagagccgcattcatctacgggctctacgttattatagtaactggcggcaatactttgccggttatacctttggtcggcaatattggcagtctcccgaagatgatcatctgcctttattacgcgaattcttagcgcgtaaagaatacgacgattccggcaatgatatgttttatcaattatttgccagtgatgatgcgtattaccctaccttgtcctggcaaccattggcttactattctgcatgcccggaaacgcttaaggatatgagcgacctatgaaaaattgctggaagatcctcgatatagaggaaacgactgacgtcgatattatccgccgcgcttatctggcgctgttaccgtcctttcatccagaaaccgatccgcagggttttaaacaacttcgtcaggcgtatgaggaggcgctacggattgcgcagagccctgctaaatctgtttggcaaccagaagaatatgaggtagcagaacatgaaattctgctcgcctttcgtgcgttacttgcctctgatagtgaacgttttctgccctccgcctggcagcgattcattcagcaattaaattattgcagcatggaggagattgatgaattacgctggagcctgtgcacaatcgccatgaacactgcccatttatccttcgagtgcgtggtgttattagcagaaagattgcggtggttacaggaggaaaataccggggaaatagacgaagaagaactggaatcctttttatatgccattgcgaaggggaatgtttttaacttccagaccattctgcatctgcccgttgccgtgcaaaatgacaccatcgatttttaccaaatgttcgctcggatttggagtagccatccacaatggctgacattgtatttagcgcaacatcgcgcagtgattatccccgatgatgcaaaactgcacagaaatttactccgctggtatagcgcaggtcgcctggatatccccgaacttctggattacgcccagagttggcgggaaactgaacctgataatgaagatgcgccttattatgaatacgcgcaacgcgtctattgtggagaaggcgaaagcctgttggcagaactttgtgactactggcgcgagtatccctccacccaggcggatgctttaatgttgcaatggtgccgtcagcatcgggtcgattattacccattactggtgatgatgattgaagcgcgtgatctggttaacgatcagggaaaaccgctactttatgtccccggcgacagcgcccgtacgcgttttcatttatacgaaatactcagcgatgaaaaactctctgcgctggggcgtagtctggtcgagatggttttgcacaaaggacgtaagccgcggatcagtctcacgcgtgatacagaacataccttatggccattatatctagttgccaaacaattagtgcaggcctgccaacctacagaagaaagtttaatgccgattgtgagccgccttgatgcagaaaatcgttgtccactggaagcattaattattcgtcgattattaattcaggcggcgaattttaccgagaagcaaactgttgaaccggagccgcaaccgcagccaatgcccgttgacgatggtgggccaggctgtctgggcatcattaaaattattttctatatttttatctttgctggtttgatagggaaaatactccatctgttcgggtgacagtcgacgttaatgtgcgggaagcccggcaagtaatctttccgcatttttgtaatgttgtttggcggtcagttttaaccatttttgagattcataatggttaacattaataccactgccatttctgtagatcaaacctaaagtatattgagcatgagcatacccttgttcagctgcttccttataccagagaattgctttacgggtgtcgggtttgacccccagacctttgaggtagatccaccccagtttactttgcgcgcgtggattttcctgttccgcactttgctcataccagtatctcgcctgtgtataatccagtggtttaccgtcgctaccatgaagataaaattctccaaggcgatattggctcgtactgtgaccatgaatcgcggaaagctccgtggctgccgtggtgaatggaagactgcccggactgcttaaataatcaaaggcataattcaccatggctttatcacgcaacgtcgttttcttgggttggctaatacaggtaattgctgcaactataaaaattgcgaatatatacattaattttttattcatgtgtgaatgcttcgattttctttttattttgaaagcgtcaagtttatactcatcaataataaaaaagtagtcagttaatgcacttaagggattattaacaaatgaataaggaagaacaatatcttctttttgcgctttctgcgcccatggaaatacttaatcagggttgcaaacccgcgcatgacagcccaaaaatgtatactgggataaaagaattcgagctcagtagttcctggggaataaataatcgtgatgatttaattcagactatttatcagatgactgatgatggtcatgccaatgatttagctggcttatatctgacatggcatcgctcttcccctgaagagtggaaagcattaattgctggtggcagcgagagagggttgatttatacccaattcgttgcccaaaccgctatgtgctgtggggaagggggaatcaaagcctgggattatgttcgaatggggtttctgagtcgggtcggtgtgctcaacaagtggctgacggaagaagagagtttatggctgcaaagccgcgtctatgtacgagctcaccattactatcacagctggatgcactatttttccgcctatagcttaggacgtctctactggcaatcttctcagtgcgaagacaacactagcctacgcgaggcgctaaccctgtacaaatacgatagcgccgggagtcgtatgttcgaagagctggcagcgggaagcgatcgtttctatgccacgcttccctggcagccattaactgtccagtctgaatgcccggtaacgcttaaggatgtgagcgacctatgaaaacatgttggcaaatcctcgaaattgaaagcacgacgcaaatagacattatccgccaggcttatcttgctcgcttaccgttgtgtcatcccgaaaccgatccgcaagggtttaaagcattacgccaggcctatgaagaggccctgcgactggcggtaaatcctgtcgaggaagcagatgatgaagaaaaagatgctgccgctgaacatgaaatactacgtgcattcaggacattactggatagtgaaagtgatcgttttcagccttccgcctggcagaaatttattcagcaattaaatacctggaacatggaggatgtcgatcaattacgctggccgctgtgtgcaatcgccatagaagcgcgatatcttagtttaaattgtgcttctttgctggcagagcgtttgaactggcatagttttaatgacagcgaaggaatggatgaggaagaaagggaggcttttcttgaggccattcaggctggtgattgtttcgatttccttagccttctggaatatcccattgcgttgcagaaccagactgttgagtattacttcgcgctggaacgttgctgccgttaccatcctgactatgtcactgcgtttttggcgatggaaggtccgtggttaattcctgatgatgcaaagttacatcgcaaactgttgcgctggtacagcagcgtgcaaacaggtatggcggaactcattcctgtcgctcaacagtggcaaacggaagaaccagaaagcgaagatgcccggtattacttgtgtgcacaacgtttgtactgcggcgagggggaaagcctgcttgccgatctctgcgcgtactgggaaagttacccatctacacaagctgataatttgttgttgcagtggagcaagcgtcattgcccggattatttcgcgttattagtgatggttatcgaagcgcggagcatggtagatgcgcaaggtcaaccgctgaaatatgttcctggtgagagcgcccggacgcggctgttatgggcggagattttacatagcggaaaattaagcccgttaggtcaaagctttattgagagcttattcttcaagcgcaaagcatgggcgtggtggaaaagcagagtcggtagcgagacagagcaagatagtccgttcctggatttgtatcgggtagcggaacaggtagtacttgaagcgtttccgaaacaagagatgctggcccgtcttaatacaaggctggaaggcggagatgctcatccattagaggccattgtcacccggatgcttttgacgaaagtgaaactcgagccggaggatgaagatgtcgatgagccaacacctgaaaatcatgaagaaaaaaatgatgagggtgaaaaaccacagagcattaccagcattatcaaaatcagtttaacggtgctggtgataggttatgctctcggcaaaatcgcgatgttgtttagctgacgatgtgttttttgcgccgatgccggatgcagcgtttacgccgcatccggcagccgtgtttatgggatctcaatggctaaataatcgctcgcccgccgccgaacttcatccacgcgggccatatcgttactctgcaacgccgcatcaaaatcggtgatcacccggccgatctcttctcgctcgtcacccagcgcccgcgcccacaactcttccagtttggctttaaaggtgcgattgatgagcatatcgcgcggataaattttcaatgcggataaccgcgtccgactctcttcaatctgctgcgcgctcaatgttaccgggctgtggttaatcactctggacttaacgctgccgtcttccagaagcacgtcaacttcaagcaacccgttgatatcataactaaagcgaatatcaatgctctgataagccccggttttcttcaacggcacatcgaaggattccaccagaatgttgtttttaactttgtggttttctccctgatagacgttaaccgtaatactatcctgttccgggtgcatggtactataagtttctacacggctcacgggcacagtggtgtttcgttcaataatcgggctgaaaatgccggaaacgccctggcggttaacttcaacgcccaagctgtaagggcaaatatcagtgaggattacctcttcaatatcttcactgcgtaagcggcaggcggcctggattgctgcgcccagcgcgacaatggtgctcggatcgtaactttgatacggtaatttgccaaacagacgcacggcgattcgctgcaccagcggcatttgactcgcgccgccaaccagcaccagactgtcgatttgactcggcttcagacgcgcatcgcgcaacgcctgttcaatcggcactcgcaagcgattgagcagcggcaaccacaaatcttccagttcgttctcgtaaaattcgcattcccgcgtttcttcctgatactgccagcgaatgtgcaatgggctttgattgctacattttgccgcttccacacaggcgtacaaggctgccagttcactctcgttaagcgtggtcctggcgacatccgcgcgttttaaaacctcatcgaccagcatatgggtaaaatcttcgccaccaagaaagttgtcgccagcggaggcgtgaacttcaatcaccggcgtggcgtactcaagcaccgtaacgtcaaacgtgccgccaccgagatcaaacaccaggctacgggtattttgttgggtatgcaggccatacgccatcgcagctgctgtgggttcattaattaagcgtaccgcatttaacccggctaactccgctgctaaacgggtatgcttgcgttgttcatcgctgaaataagccggaacggagatcaccacatctttaatcggacgttgcagaaattcttcggcatcttcttttaaactgcgtaataccaaagaggacagttctggcgcgttaaatgtgtcgctgcctaaccgccagttggtattactgcccattgcacgtttaaataacgctgccgttttatccggatggctagtacgccgacttacagccggttttccgactaaaatatgattattttcatccatgctaattatggatggtgttaaatattcaccgaacttatttggaattaattgcgcggcaccgtctttccagacggcaattaaactattggtagtaccgagatcgataccaatggcgagttctgcattatccattgcatttatatcttgaaagaaaaagagataaacagattaagaccacccaggtaacgcgtggtgatcttaatcaatgacgtgtgttaagcgtaaaatttcagacgatcagccagtaaatcaacaaagccctgacgatcaacatcgaccattacggtggcattcggtttattgcctgtcagataataataatcaacaaccgtcataccctgggtatatttcccctgtgtttccacgccaacccagcgctcaacagaggtaaataactccggtttcaacagccaggcgatggtgcatgggtcatgcagtggtgcgccgacaaagccccatttttcgtctttatgatattcgaggaagaaatccagcagttcggcaacaatggtactaacagggttaccaatcgcgcggaaacgctcggtgtcttcaacgtggatttgtgctttatgagtaacatccagaccggccatcaccaccgggatcccactctggaagacaatttctgccgcttccgggtcaacgtaaatattaaattcagccgcaggcgtccagttacccagccccatagcgccacccataatcacgatacgggcaattttgctatgcagttccggatggctattgagcagcaaggcaacgttagtttgcggtccggtagacacaatggtgacaggttccgcactttcacgcagcgttttcgccatcagctctaccgccgtacagttttgcggtgcgaatgtcggttccggtaatgccgggccgtcgagaccgctttcgccgtgcacattgtccgcgataatcaactcacgcattaacggttttaccgcgccgcctgctaccggaatatcggtgcgattaagcaaggtcagcatacgcagaacattgcgtaaggttttttctggtgtctggtttccggcggaagacgtaattgctttgacatcaagctctggactggcgagggcgagaactattgcgatagcgtcgtcatgacctgggtcgcaatctaacagaattggcagtgccattgttgctccttgttgtgtgcttctttgcgacaagggtaacgccaggatgtaacagatacgaggggcgaaacgataaagcgtgagatggcgcgcaattgggtatgcgcgccagagtgattaatgcaggattttcgcgaggaagtcttttgcgcggtcgcttttcggatcatcgaagaaagcgtctttcgggctgtcttcgacaattttaccctcgtccataaagatcacccgattcgccactttacgggcaaagcccatttcgtgggtcaccaccatcatggtcattccttcgttcgccagttccaccatcacgtccagtacttcgttgatcatctccggatccagcgcgcttgtcggttcgtcaaacagcatcgcaataggatccatacacaacgcgcgagcgattgccacacgctgctgctgaccgccggaaagctgcgccggaaacttattggcgtgagcagaaagcccgacacgctccagcagtttcagggctttttcacgagccggcgctttatcgcgtttaagcactttcacctgcgccagggtcaggttttcgataatgctcagatgagggaacagctcgaaatgctggaataccatcccgacgcgggaacgcagctttgccagatcggttttcttgtcgttaaccacgataccatcgacggtgatttcaccttgctgcaccggttcgaggccgttgacggttttaatcagcgtacttttgccggaaccagacgggccgcaaaccaccaccacttcgccttttttcacttcggtactgcagtcggtcagcacctgaaagtgaccataccatttactaacatttttcagggtaatcattatgctgtccttcttttcaagtagctgaccaacaagctcgcgctaagactaataacgaaataaacaaatccggcaaacaggatcatctcaacctgcgtaccatcacgctcaccaatggtactggcggtacggaagaaatcggccagggataacacatacaccagactggtatcctggaacagtacgatgccctgagtgagcagcagcggcaccatcgcgcggaacgcctgcggcagaataatcagtttcatgctctgccagtgagtcattcccaacgccagcgcggcgctgctttgaccacgagaaatactttgaataccagcacggataatctcactatagtaggccgcttcaaacatgctaaacgccaccatcgcgctaattaaacggatatcattttttgggcttaatcccagcacgttttgcagaaaacccggcacgatcaggtaaaaccacagcaaaaccataactaaaggaatgctgcggaatacgttaacgtaggctttggcaaaccacgccacgggcgcaaagctggataaacgcatcaccgccagcatcgtgccccacaaaataccaatcactaccgccgtgacggtgattttcagggtgatcaccagcccgtcgagcagatatggcagggaagggacaatggaactccagtcaaactcgtacattatttgccccccatgttgccaggcaggcgaactttacgttcaaccagcgtcatcaccagcatgataaaagcgttaatcaacacatacgccagcgtaatggcggtaaagctctcccaggcatgggcactgtaatcgagcaatttacccgcctgcgccgccatatccaccagaccgatagtgctggcgatggcggagtttttcaccaggttcatcatctcactggtcatcggcgggacgataacgcgataagcattaggcagcagtacgtatcgataagcctgcggtagcgtcaggcccatcgccagcgcggcatttttttgccctcgcggcaggctctgaatcgcggcgcgtacctgttcgcaaacacgggcggcggtaaacagccccaggcagagcatggaactaaggaaaaactgaatattgggatccagctcggccttaaaccacatgccgattttctccggcagcagctccgggatcaccagataccaggtaaagaattgcacaatcaacggcacgttgcggaacagttcgacatacaacgtacccagaccagagagaaaacggtttggaacggtacgtaaaatgccgaaaaaactaccgacgaggaaagcgataatccaggcgcagatgctcaaagcgatcgtcacctgaaaaccactccagatccaaccaagataggtggtgttgccgaacggggcttgttgtaaaaaaataccccagttccagtctatagacataaatctactccagaaaaaagagggtagcagcgttaactgctaccctcgaagattgttacccagcgtattgcggttttcaggcccgatggggaacgaccatcaggcgtatagtctgtccgtgctacgtaacaatcgagagggctggaatttccgcccctggttcttgtaattagttcagtgccttgtcattcggttctttgaacagtgctttcatttcgtcactcagttcgaaattcatgttcaggtttttcggcggaattggatttttgaaccacttatcaaaccatttttccgcttcaccggaggtctgcacctgagcgatggtgtcatccatcagctttttgaactgcggatcatctttacgcaacatacaaccgtaggcctcctgagactgcggcttgccgacgatttcccagttgtctggtttcttcgctttcgcacgttcaccggccagcagagcgtcatccatcataaaggcaacggcacgaccgctttccagggtgcggaaagagtcaccgtgatctttggcgctgatgatgcgcatattcattttttgctcttcattcagtttgttgagcaaaacttcagaggtagtgccggaagtgacgactacggctttgtctttcaggttggcaaaatctttgatatcgccaccctttttggtcaacaggcgcgtaccgaccacgaaaatagtgtcagagaaagccgcctgtttttggcgttcgacgttgttggtggtagaaccacattcaaaatcgaaagtgccgttttgcagcagtggaatacggttttgactggtaatcggaatcagttttacctgcaagtccggtttgttgagtttctttttcactgcttcaacaatggcgttggagtaatcctggctgtaacccaccactttttgctgattgtcgtaataagagaaaggcacactagattcacggtgaccgacgacaatcacaccgtttttggcgattttgtccagagtactgcccgctgccggggcggcgtcatctgcctgtgccagtcctgcggaaagcgccagggcgaggattgctgtggcaggtttacgtaattgcatatccaactcctttatcttctgcgttaagaacgcatggatacccgttgtgagtgtttgtgttgttatcgtctgcaactttattgtgcagtgttgtgcctgttagggaaggtgccttaggtaacatttagtttggctaaatgtaaagatattgctgttttattgtttgtttttgcgagatgcgccgcaccattccgaagcaaaattcttaaaatgcactcttttagtgctaccgctggattactgtggtgcaactaggttgtactgatgctgtttcagggtttgccttgtataacaaagcaatagatgtgccaaagttggataggagaatattgttatccggataatgcactgatgccgcatccggtgagcgtgccgaaatatgggatgtattccggcacgataagaagggattatttacgtcgctgacgcagactcatcaacacagcagcaaaaccaaacaatgccgtcagcacccacagcggccagttgccggtacgtgcgtatggtgtgagtccggtggtcggcgtcacgttagtggttaacacctcgcgggtgaactgcgggatcatcgcctgaatctcaccctgcgggccaatcaccgccgtaatgccgttgttggtgctgcgcaacagtgggcgcgccagctccagcgcacgcattcgcgccatctggaagtgttgccatggaccaatagatttaccaaaccacgcatcgttggagatagtcagcagatagtcggtatccgggcggaagttatcgcgcacttgctcgccgagaatgatctcgtagcaaatagccgcagtaagctcaataccatttgcgctcagcggcggctggatatatggcccacggctgaagctgctcatcggcagatcaaagaacggtgctaacggacgcagaatgctctccagcgggacaaactcgccaaacggcaccagatggtttttgttatagcgatcggcactttcgtagctgtacggcgcacctttacccagcgtgatgatggtgttgtaggtatcgtagcggttctgcttattgagacgcgcgtcgacaatcccggttaccaggctgctacctttatcacgcaactcaccgtccagtgctttgaggaacggttgctgattaatttccagatcggttatcgcgctctccggccagataatcaagctacttttgcccatcagcggtgccgttgcgttgtagtaaatcttcagcgtattaagaagctggccttcgtcccatttcaggctttgcggaatatcgccctgaaccatgctaacctgaatggttttctccggttgtggggtaaaccactggatgtaacgcagcgggaagggaagggcaaacagcacgacggccaccaccagcggacgccagttgcgtttgaccaacgccagtgccagcaggccactaaccatcatcagcaggaagttaatggcttccacgcccattatcggtgccagcccttttaacgggccatcaatctggctatagccgaactgtaaccacgggaagccggtcagtacccaaccgcgcagaaactcggtcacttgccagagggcaggggcggcaatcgctacgcgcagccaggtggttttcggccacagacggctcagcacgccagcaaacagtccggtatacaggctcaaatacgccgccagcagcaccaccaggaagatgttaaccgggccaggcattccgccaaaggtcgcgatgctgacatagacccagttaataccgctgccaaagaggccaaatccccagcaaaagccaatagcggcagactggagtggacggcggttaaaggtcaacgcctgaagccccatcaggctaataatcgccgcaggccagacgtcgtaaggagagaaggccagcgttccgcaggcaccgaataataacgccagcagcaggcgaatgcgctggcgttcaattaaactggcaaaagccatgtagttatctatccagtttcggttttattcatccagcttcggctggggactgtcatccgggattttgacatgaacctgaataatacgccgactgtcggccatcgccactttgaactggtaaccgtcgatgtcgatagtttcgccacgcgccggaagatgcccaaatgcctgcatcaccagaccaccgatagtgtcgacttcttcatcgctaaagtgggtgccgaacgcttcgttgaagtcttcaatggaagccagtgcgcgtacggtccaggtatgacgactcagctgacggaagtcgatatcatcttcttcgtcatactcgtcttcaatctcaccaacaatcagttccaggatgtcttcaatggtcaccagaccggaaaccccaccgaattcgtcaataacgatcgccatgtggtaacgctgagagcgaaactctttcagcatccggtctacgcgcttactttcaggaacgacaaccgcctgacgtaacactttgtccatgctgaaggcttcagcatcgctgcgcataaacggcagcaagtctttcgccatcagaatcccttcaatgtgatctttgtcttcgctaatcaccgggaaacgactgtgggcggactcgatgatgacatcaagacattcgtccagcgtctggttgcgtttcagggtaatcatctgggagcgggggatcatgatgtcgcgaacgcgttggtctgcgatgtccatcaccccttcgagcatatcgcgcgtatcttcgtcgataaggtcgttctgcccggaatcacggatcagcgccagcagttcgtcacggtttttcggttcaccgtggaaaagttggctgagtaacagggagaaaaatcccttcttgttgcttatcgtgtcactactgtgactattgtcgtcgctcatggcgtcgtatgggttctcatgttagttaatcaaaacgccgtcgttaatcaccaacggcggggacgtctgccagtcaaatgcctggcaaattattctttctcggcaatgtacggatcctcatagcccagagcaagcataatctctgtttcgagggcttccatttcttctgcttcgtcatcttcgatgtgatcgtaacctaacaaatgcagactgccgtgcaccaccatatgcgcccagtgcgcctccagtggtttgccttgctcctgagcttccttctcaaccacctgacggcagataaccagatcgcccagtaggctcatttccatgccaggcggcacttcaaacgggaaggagagcacgttggtcggcttatccttaccgcgataggtcagattcagactgtggctttcggcggtatcgaccacgcgaatcgtcacttcgctttcttcctgaaactgcgggatcaccgcattcagccatgtctgaaactggctctcttccggtaacccggaattatcttcacatgccagttgtaaatcgaggatcacctgactcatttttgttcctgttcttcgcgcttgcgttctgctgccagcgccgcttttcgtttttgttcggcttcttcccaggcttcataggcgttaacgatacgcgccaccacagggtgacgaaccacgtcttcgctgtggaagaagttaaagctgatctcttcgacatcggccagcacttcgatggcgtgacgtaagccacttttagtattacgcggcaggtcgatctgtgtgacgtcgccggtgataaccgctttactgttaaaaccgatacgggtcaggaacatcttcatctgttcgatggtggtgttctggctctcatcgagaatgataaacgcgtcgttcagcgtacgaccacgcatataggccagcggtgcgacttcaataacgttgcgctcaatcagtttctcgactttctcaaagcccagcatttcaaacagcgcgtcgtacagcgggcgcagatacgggtctactttctggcttaaatcgccaggcaggaagcccagtttctcaccggcttctactgccggacgagtcagcagaatacggcgaatttcctgacgctccagggcatcaactgccgcagccactgccaggtaggttttacccgtacccgccgggccaacgccgaaggtaatgtcatggtcgagaatattggcgatgtactgcgcctggtttggcgtgcgcggcttaattacgccgcgtttggttttgatattgaccgctttgccgtactccggcacgctctccgcgctttgctccagtacccgcgcttctttaatcgcaaggtggatctgttccggttcgatatcctgaatctgaccgcgcatcggggcagtatcgacatacaggctacgcagaatgtctgccgcagcggtgacgcaaatcggacggccggtcagtttaaagtggttatcgcggcgattgatctcgatgccgagacggcgttcgagctgcttgatgttgtcatcaaacgggccgcacaggctcaacagacgcgcattgtctgctggctccagggtgatttcgcgagtgtctatgttcaaaccgttcctcttatctgtatgccgccggaagctgaacattcaccggcctataaggaaattattcacgccacaggaaaaaggcgcaagcattgcaataaagatggggataaagagagaaaaaacaaggcccaccggaacggcaggcctgagaattacggctgataataacccacgccaaggtcgttttctttgcgggtacgggcaatcacactttccggtgtttctgccacgcgcagacccatttcatcttcagtacgcaccactttaccgcgcagagagttcgggtagacgtcggtaatttctacatcgacgaatttaccgatcatatccggcgtgccttcgaagttgaccacgcggttattttccgtacgcccggaaagctccatgatgctcttacggcttgtaccttctaccagaatacgctgggtggtgccgagcatccggcggctccacgccatcgcttgctgattaatgcgctcttgcagaatatacagacgctgcttcttctcttcttccggaacatcatcaaccatatcggcggctggtgtacccggacgtgcagagaagataaagctgtagctcatgtcgaaattgacgtcggcaatcagcttcatcgttttctcgaagtcttcggtggtttcgccagggaagccaacgatgaaatcagaactgatctgaatatctggacgcgccgcacgcagtttacggatgatcgctttgtactccagcgccgtatgggtacggcccatcaggttcagaatgcgatcggaaccgctctgtaccggcagatgcaggaagctcaccagctccggcgtgtcgcgatacacttcgatgatatcgtcggtgaattcgatcggatggctggtggtaaagcgaatacgatcgatcccgtcgatcgcagcaaccagacgcagcagatcggcaaagcttccggtggtgccgtcgtagttttcaccacgccaggcgttcacgttctgaccgagcaggttgacttcacgcacgccctgagccgcaagctgggcaatctcaaacagaatatcgtcggacggacggcttacctcttcaccacgggtgtaaggcaccacgcagtaggtgcaatatttattgcagccttccatgatggagacaaacgcggtcggcccttcggcgcgcggttccggtagacggtcaaacttctcgatttccgggaagctgatatctacaaccgggctgcggtcgccacgcacggagttgatcatctccggcagacggtgcagcgtttgcggcccaaaaataatatcgacatagtgggcgcgctggcgaatgtgctcgccttcttggcttgccacgcagccaccgacgccgataatcaggtctggattcttctcttttaacagtttccagcgacccaactgatggaagactttttcctgagccttctcgcggatactgcaggtgttcagcagcagcacatccgcttcttccgccacgtcggtcagttgatagccgtgggtggcatccagcagatcggccatcttgctactatcgtactcgttcatctgacagccccaggttttaatatggagttttttggtcatcgacttgctcttgcgaaatagtagccaggaatgcagggcgcatagtgtaatgctttgctgccgttgtgaccagtatgagcgttatcagcccttaggggtaaaaatcctgtaaacttaaagcatattgctaacaggatgattgaccatgacaaatcaaccaacggaaattgccattgtcggcggaggaatggtcggcggcgcactggcgctggggctggcacagcacggatttgcggtaacggtgatcgagcacgcagaaccagcgccgtttgtcgctgatagccaaccggacgtgcggatcagcgcgatcagcgcggctagcgtaagtttgcttaaagggttaggggtctgggatgcagtacaggctatgcgttgccatccttaccgcagactggaaacgtgggagtgggaaacggcgcatgtggtgtttgacgccgctgaacttaagctaccgctgcttggctatatggtggaaaacactgtcctgcaacaggcgttgtggcaggcgctggaagcgcatccgaaagtaacgttacgtgtgccaggcagcctgattgcgctgcatcgccatgatgatcttcaggagctggagctgaaaggcggtgaagtgattcgcgcgaagctggtgattggtgccgacggcgcaaatagccaggtgcggcagatggcgggaattggcgttcatgcatggcagtatgcgcagagctgcatgttgattagcgtccagtgcgagaacgatcccggcgacagcacctggcagcaatttactccggacggaccgcgtgcgtttctgccgttgtttgataactgggcaagcctggtgtggtatgactctccggcgcgtattcgccagttgcagaatatgaatatggcacagctccaggcggaaatcgcgaagcatttcccgagccgtctgggttacgttacaccgcttgccgctggtgcgtttccgctgacgcgtcgccatgcgttgcagtacgtgcagccagggcttgcgctggtgggcgatgccgcgcataccatccatccgctggcggggcagggagtgaatcttggttatcgtgatgtcgatgccctgattgatgttctggtcaacgcccgcagctacggcgaagcgtgggccagttatcctgtcctcaagcgttaccagatgcggcgcatggcggataacttcattatgcaaagcggtatggatctgttttatgccggattcagcaataatctgccaccactgcgttttatgcgtaatctcgggttaatggcggcggagcgtgctggcgtgttgaaacgtcaggcgctgaaatatgcgttagggttgtaaccttacaacattgccggatgcgtgccaaccgtaggtcggataagacgcggcagcgtcgcatccgacattgaaggataagacgtgtcaacatcgcattcgacattgaatgaacgcagaaaagcaaaaagctcgccgaagcgagcttttttaatgtggctggggtacgaggattcgaacctcggaatgccggaatcagaatccggtgccttaccgcttggcgataccccaactgggtgcacttacaaggtaagcgtcttgaataaattggctggggtacgaggattcgaacctcggaatgccggaatcagaatccggtgccttaccgcttggcgataccccaacaaattggttttgaatttgccgaacatattcgatacattcagaatttggtggctacgacgggattcgaacctgtgaccccatcattatgagtgatgtgctctaaccaactgagctacgtagccagattgtttcttcgatggctggggtacctggattcgaaccagggaatgccggtatcaaaaaccggtgccttaccgcttggcgataccccaataaccgggcggtgaaccgcttactcgaagaagatggctggggtacctggattcgaaccagggaatgccggtatcaaaaaccggtgccttaccgcttggcgataccccatccgtacaacgctttctggtgaatggtgcgggaggcgagacttgaactcgcacaccttgcggcgccagaacctaaatctggtgcgtctaccaatttcgccactcccgcaaaaaaagatggtggctacgacgggattcgaacctgtgaccccatcattatgagtgatgtgctctaaccaactgagctacgtagccatcttttttttcgcgataccttatcggcgttgcggggcgcattatgcgtatagagccttgcagcgtcaacctctttttcaaggaaaattgctcgaaagtgactgtttggttaggttgcgaacagcgtggcgctatattcgtcaattattgtttactttgtgttttttcccaccctacagccattcttttgtcatacaggatgaaattcggaatttaacaatagtggtgggaaattaatctatgaaatactggcctacagtgatgagttgtcaaacagtgatgtggcaaacccggaacatttccttactgcatatcagaatcaacaagcacctcaataactgaaacagccccggatttcaccggggctgtttcgcatttcttacttatacgcgctctggtgaacaccaaccgcgcgaccagacggatcgtccattttcttgaacgcttcatcccattcgatcgctttagcggaagaacaagcgacggaaggaccgcccggcacgcactcagcggcgctcggaagcgggaatagttcttcaaagatctcccgatacaagtacgcttctttagaggttggcgtgttgtacgggaagcggaagcgggcagtttccagttgctgatcagaaacctgctgcgcagccacttctttcagggtgtcgatccaactgtaaccgacgccatcggagaactgctctttctgccgccaggccacgcttgcaggcagatacgcttcaaaacattcacgcaggatgtgtttttccattttgccgttaccgcacattttatcctgtgggttaatacgcatcgccacatcaaggaattttttgtcgaggaacggaacgcgtgcttccacgccccaggcactcatcgctttgttggcacgcgcgcagtcatacatatgcagggccagcagtttacgcaccgtctcttcatgcagttctttggcattcggtgctttgtggaagtaaagataaccgccgaacacttcatcagaaccttcaccggacagcaccattttaatgcccatcgccttgatcttacggctcattaaatacatcggtgtactagcgcgaatagtggtcacatcataagtttcgatgtggtaaatcacgtcgcggatggcatccagaccttcctgtacagtgaagtgaatttcgtgatgcaccgtgcccagatggtttgccacttcctgggctgctttcagatccggactacccggcagacctacagcaaaggagtgtaactgcggccaccaggcttcagagcgttcctgatcttccacgcgacgggctgcgtatttcttggtgatagcggaaataatactggaatccagaccaccagaaagcagcacaccgtaaggcacatcagacatcagatggcttttaacactatcttccagtgcctgacgcagctcgtttttgtcggtcacgttatctttcaccgcatcgtagtcgaaccagtcgcgatgatagtaagaacggatttcgccgtcctggctccacaaatagctccccgccgggaactctttaatcgtgcggcaaactggcaccagcgctttcatttcactggccacatacagctgaccgtgttcgtcataccccatatacagtgggatgatccccagatggtcgcgaccaatcaggtaggcatctttttcgctgtcgtacagtgcaaaggcaaacatgccctgcaagtcgtcgagaaattccggccctttttcctgatacagcgcgaggatcacttcacagtcagacccggtctggaactggtaacgatcgccatattcggcgcgcaatgcctggtggttgtagatttcaccgtttaccgccagtacgtgggttttttgttggttgtagagaggttgcgcccccgcgttaacgtcaacaatactcagacgttcgtgggcgagaatggcgttatcgctggcataaataccggaccagtccgggccacgatgacgcatcaggcgactcagctcgagggctttcttacgcagctcaactgcgtctgttttgatatcgaatacgccaaaaatactacacataaccttctccgttaacctggtatttgttgcttgttgtgtttgcttgtttaaaaaaatgccgcaaagcagcactgtgcgcaagcgatttggcggtgaaaaaataaaaaacgtaatggtgattgtcgattggtgaaaaaaggtctggtgtgaggatatatttattgatgaatcgataatttttagcgggttttattgaatgtttatattttacgggggccaaattgctgacaaagtgcgatttgttcatgccggatgcggcgtgaacgccttatccggcctacaaaagcatgaaaattcaatatattgcaggagctgcgtaggcctgataagcgtagcgcatcaggcagtttggcgtttgtcatcagagccaaccacgtccgcagacgtggttgctattcagataacgtcgatttcagcgacactcgggtaaatccagctggggcggaaaggcatactgtcgatatcgtcgaggctgctaacaccagaaagcaccagaatcgtctccagacctgcctggaagccggccagaatatcggtacgcaggttatcgccgacaatcaccgtttcttcgctatgcgcctgcattttgtttaatgctgcgcggatgatccacgggctgggcttaccaacatagaacggtttgcgcccggagattttctcaatccctgcacacaacgcgccacaagcgggataaaaaccgcgcccgtgggtgtccggattggtggcgataaaacgtgcaccgttagcgacgaaataggctgctttatgcatcatgtcccagttgtaggaacgcgtttcgccaacaatcacgaaatcagggttcacatcggtaatagtgaaaccggctttgtacagttcatgaatcagtgcgccttcgcccaccacatacgctttcttgccttcctggcgacgcaggaaatcggcagtcgccatcgcagaggtataaaacacgctgtcaggtacatcgacacctgcggtggcaaagcggttcgccagatcttgcccagtctggctaggatagttggtcagcaacaccagcggcaggcctttatccataatcccgtgcaaaaattccgctgcacccggtacggcgacgttatcgtgcatcagcacgccgtcgatatcgcaaattacatttttaatggtcatggactacccagaatattgacaacaataagcgccactataaaagcacattaattttccagcaaatgctggagcaaaataccgttgagcatggcgcgttttaccagcgcaaaagcgccgattgcgctgcggtgatccagctcagaacgtaccaccggcagattagtgcgaaacgccttcagcgcctgggtattaatgcagctttcaatagcagggagcagcactttatcggcttcggtgatttcaccggcaataacaattttttgcggattaaataagttgatagcaatggcgatggttttacccagatgacgaccgacatactcaattacttcgctcgccagactatcgcctttgttcgcggctttgcagatagttttgatggtgcagtcgtccagcggcacgcggctctggtagccctgctttaacagattcaacacccgttgttcaatggcagcgttggcagcgatagtttccaggcagccaaagttgccgcagtggcagcgttcacccagcggttcgacctgaatatggccaatttcaccgacgttgccgttgcggccaataaaaatgcgcccgttagagataatcccggccccggttccgcgatggacacgcaccagaatggagtcttcgcaatcctgacttgcaccgaagtagtgctccgccagcgccagactacggatatcgtgaccaacgaaacaggtcactttaaaacgttcttccagagcttctaccagcccccagttttctacctgaatatgcggcatgtaatgaattttgccgctgtccgggtcaacaagccctggcaggatcacgctaatcgcgatcagctcgcgcagtttgcgctggtagctatcaataaactgagcaatggcattcaacagggcatgttccagcgtttgctgggtacgttccggcagcgggtaatgttcttctgccagcactttgctgctgagatcaaacagagtgatggtggcgtcatgacgaccaagccgtacgccgattgcgtggaaattgcgggtttcggtgacgatggagatagcgcggcggcccccggtggaggcctgctgatcaacttctttgatcagcccgcgttcgataagctgacgcgtaattttggttacgctggcgggggcaagctggctttgctcggcaatctgaatccggctgattggcccgtactggtcaatcaggcgataaaccgccgcgctgttaagctgttttacgagatcaacattacctatctgagcttgtccgcctggtgtcatactttctcttattgagttacgacctcgttaccgttaacgatggtcttggtgattttaaaatcaggtgtgaatgcagtcaggttggctactttacctgcggcgagtgtgccgagacgtttctcaacgccaatcgcacgcgccggatagagcgtcgccatacgtagcacttcatccagtgcgataccgcaatgttcgaccagattacgcacgccttcaatcatggttaaggaactaccgcttaacgtaccgttctcatccacacaaagtccgttacggtagtatattgttttacccgcaaaaatgaactgttcaatgttggcacctgctggcgcggtggcgtcagtaaccagacacagtttgtcgcctttcagacgtttagcgttgcgaatgttggcgtaatcaacatgcaggccatcagcaataataccgcaataaatgtcagcttcgtcgaggatcgcgcccgccaggccaggttcacgaccggtaatatacggcatcgcgttgtacagatgggtggcaaaggtaatccccgcgcggaaaccggcttttgcttctttcaacgtcgcgttggagtgaccggcagaaaccacaatcccggcatttgccagtttgctgatgacttccgcaggaaccatttccggtgccagggtcactttggtaatgacgtcggcgttttcacacaggaaatcgaccagcgcggcatcaggcttacgcacaaaattcggattatgggtgcctttttttaccagattcagccacggaccttccagatgcagacctaacgcctgattcggatgttttgccaggtactcgcgcataacgcgcacgccctgtttcatcagctcatcgctggtggtgataagcgtcggcagatagttagtacagccacttttctcattggctttctgcatgatttccagcgtttccacgctgaccgcttcagcggtgtcgttaaactgtacgccgccgcagccgtttaactgcacatcgataaaaccgggggagagaatggccccgttcagactacgttgttcgatctctggcggcagttccgctaccggacagacgcttttaatcaggccatcagcgataacaaccgcgtggtcatcaagaaattcgtggccggtaaagatccggccctgggttaatgcatacattctgacccccgattttaaaaaatattgccctgagcaaggagccagggcagggataacaattacagacctttgatattttctgcttctaattcattgaaatatcttaaagtcttaactttcagctccatggtggaaggttcatcgcacaccatgatcgctttcggatgcagttgcagacagctgatggtccacatatggttcacgcaaccttcaacggcggcctgcagcgccagtgctttctggctacccagcaccagaatcatcacttcttcggcatccagcagtgtaccaacaccgacagtcagggcatattttggcacctgattaacatcgttatcaaagaaacgagagtttgcgacgcgagtgtcatgagtcagggttttgatacgagtacgagaagccagagaagacgccggttcgttaaatgcaatatgaccgtcgttacctacaccgcccataaacagatgaatttttccgtaagaacggattttttcttcatactggcggcactcggcgtcgatatccggggcgttgccgttgagaaggttgatgttttctgctggaatatcaacgtgatcgaagaaattacggtgcataaagctgtagtagctttccggatgctctttcggcagaccgacatattcgtccatgttgaaggtgacaacgtgcttaaagctgacctggcctgctttatgcatttcgactaacgctttataggtggtcatcggcgtgccgccagtcggcaggcccagtacaaacggacgatcggcagtcggtttgaacgcattgatacgattgacgatatggcgagcagcccatttgccgacctgttcagcggtagtcagggggatcagtctcattattcacctcaataagtaaaatgtaagccgttggcggattaggcatctttaagcgtaacctggatttgcgcagacaggcgtcaatccgacctgattttttgaatgataaaataagttttctggtttagccagtaaaagggagtgataataacgatatttggtgacaaaactcacaaaagacacgcgtttaatttgcgatacgaattaaattttcacacactctgtagcagatgatctaacaatctgattacagaacatcggcagtacaatttgcagcaaaataaaaatacggcttgaaacgagccaaatagggttctcgtagggggaataagatgaatattttaggttttttccagcgactcggtagggcgttacagctccctatcgcggtgctgccggtggcggcactgttgctgcgattcggtcagccagatttacttaacgttgcgtttattgcccaggcgggcggtgcgatttttgataacctcgcattaatcttcgccatcggtgtggcatccagctggagcaaagacagcgctggtgcggcggcgctggcgggtgcggtaggttactttgtgttaaccaaagcgatggtgaccatcaacccagaaattaacatgggtgtactggcgggtatcattaccggtctggttggtggcgcagcctataaccgttggtccgatattaaactgccggacttcctgagcttcttcggcggcaaacgctttgtgccgattgccaccggattcttctgcctggtgctggcggccatttttggttacgtctggccgccggtacagcacgctatccatgcaggcggcgagtggatcgtttctgcgggcgcgctgggttccggtatctttggtttcatcaaccgtctgctgatcccaaccggtctgcatcaggtactgaacaccatcgcctggttccagattggtgaattcaccaacgcggcgggtacggttttccacggtgacattaaccgcttctatgccggtgacggcaccgcggggatgttcatgtccggcttcttcccgatcatgatgttcggtctgccgggtgcggcgctggcgatgtacttcgcagcaccgaaagagcgtcgtccgatggttggcggtatgctgctttctgttgctgttactgcgttcctgaccggtgtgactgagccgctggaattcctgttcatgttccttgctccgctgctgtacctcctgcacgcactgctgaccggtatcagcctgtttgtggcaacgctgctgggtatccacgcgggcttctctttctctgcgggggctatcgactacgcgttgatgtataacctgccggccgccagccagaacgtctggatgctgctggtgatgggcgttatcttcttcgctatctacttcgtggtgttcagtttggttatccgcatgttcaacctgaaaacgccgggtcgtgaagataaagaagacgagatcgttactgaagaagccaacagcaacactgaagaaggtctgactcaactggcaaccaactatattgctgcggttggcggcactgacaacctgaaagcgattgacgcctgtatcacccgtctgcgccttacagtggctgactctgcccgcgttaacgatacgatgtgtaaacgtctgggtgcttctggggtagtgaaactgaacaaacagactattcaggtgattgttggcgcgaaagcagaatccatcggcgatgcgatgaagaaagtcgttgcccgtggtccggtagccgctgcgagtgctgaagcaactccggcaactgccgcgcctgtagcaaaaccgcaggctgtaccaaacgcggtatctatcgcggagctggtaagcccgattaccggtgatgtcgtggcactggatcaggttcctgacgaagcattcgccagcaaagcggtgggtgacggtgtggcggtgaaaccgacagataaaatcgtcgtaagtccagccgcagggacaatcgtgaaaatcttcaacaccaaccacgcgttctgcctggaaaccgaaaaaggcgcggagatcgtcgtccatatgggtatcgacaccgtagcgctggaaggtaaaggctttaaacgtctggtggaagagggtgcgcaggtaagcgcagggcaaccgattctggaaatggatctggattacctgaacgctaacgcccgcagcatgattagcccggtggtttgcagcaatatcgacgatttcagtggcttgatcattaaagctcagggccatattgtggcgggtcaaacaccgctgtatgaaatcaaaaagtaatctgctttatgcctgatgcgacgcttgagcgtcgcatccaacaatgacaagcggtggagatcttctctgccgctttttttttcatcaatcatccccataatccttgttagattatcaattttaaaaaactaacagttgtcagcctgtcccgcttataagatcatacgccgttatacgttgtttacgctttgaggaatccacgatgagtgaggcagaagcccgcccgactaactttatccgtcagatcatcgatgaagatctggccagtggtaagcacaccacagtacacacccgtttcccgccggagccgaatggctatctgcatattggccatgcgaaatctatctgcctgaacttcgggatcgcccaggactataaaggccagtgcaacctgcgtttcgacgacactaacccggtaaaagaagatatcgagtatgttgagagcatcaaaaacgacgtagagtggttaggttttcactggtctggtaacgtccgttactcctccgattattttgatcagctccacgcctatgcgatcgaactgatcaataaaggcctggcgtacgttgatgaactgacgccggaacagatccgcgaataccgcggcaccctgacgcaaccgggtaaaaacagcccgtaccgcgaccgcagcgttgaagagaacctggcgctgttcgaaaaaatgcgtgccggtggttttgaagaaggtaaagcctgcctgcgtgcgaaaatcgacatggctagtccgtttatcgtgatgcgcgatccggtgctgtaccgtattaaatttgctgaacaccaccagactggcaacaagtggtgcatctacccgatgtacgacttcacccactgcatcagcgatgccctggaaggtattacgcactctctgtgtacgcttgagttccaggacaaccgtcgtctgtacgactgggtactggacaacatcacgattcctgttcacccgcgccagtatgagttcagccgcctgaatctggaatacaccgtgatgtccaagcgtaagttgaacctgctggtgaccgacaagcacgttgaaggctgggatgacccgcgtatgccgaccatttccggtctgcgtcgtcgtggttacactgcggcttctattcgtgagttctgcaaacgcatcggcgtgaccaagcaggacaacaccattgagatggcgagcctggaatcctgcatccgtgaagatctcaacgaaaatgcgccgcgcgcaatggcggttatcgatccggtgaaactggttatcgaaaactatcagggcgaaggcgaaatggttaccatgccgaaccatccgaacaaaccggaaatgggcagccgtcaggtgccgtttagcggtgagatttggattgatcgcgccgatttccgcgaagaagctaacaagcagtacaaacgtctggtgctgggtaaagaagtgcgtctgcgtaatgcttatgtgattaaggcagaacgcgtcgagaaagatgccgaaggtaatatcaccaccatcttctgtacttatgacgccgataccttaagcaaagatccggcagatggtcgtaaagtcaaaggtgttattcactgggtgagcgcggcacatgcgctgccggttgaaatccgtttgtatgaccgtctgttcagcgtgcctaacccaggtgctgcggatgatttcctgagcgtgattaacccggaaagcctggtgatcaaacagggctttgctgaaccgagcctgaaagatgcggttgcgggtaaagcattccagtttgagcgtgaaggttacttctgcctcgatagccgccattctacggcggaaaaaccggtatttaaccgcaccgttgggctgcgtgatacctgggcgaaagtaggcgagtaattttaagtttcgctatgccggatggggcgtttacgtcgcatccggcaaggaacagacaaacagtttcaaacgctaaattgcctgatgcgctacgcttatcaggcctacatgatctctgcaatatattgagtttgcgtgcttttgtaggccggataaggcgttcacgccgcatccggcaagaaacagcaaacaatccaaaacgccgcgttcagcggcgttttttctgcttttcttcgcgaattaattccgcttcgcaatttatccataaaataaatttaaaataacaaaacataattaaataaaatgtaaccgctttcatcttgctggaatttcacgcttttattcttctgcaagcctttcaaccgcaaacttaagccttgtaacaaaaatcatcaaaatatgtgcggttgctcatgttcttacattctggttacagaaagagattgataattcgcgtcgcgaaaaatagtctgttcctgtagtcagcgagacttttctcaacgctacttttttaatttttattttttcgctgttcacctttggtgcagcaatttatacgtcaaagaggattaacccatgcgtacgtttagtggcaaacgtagtacgctggcgctggctatcgccggtgttacagcaatgagcggctttatggcaatgccggaggctcgcgccgaaggattcatcgacgatagtaccttaaccggcggtatctattactggcagcgtgaacgcgaccgtaaagatgttaccgacggcgacaaatacaaaaccaacctttctcactccacctggaatgccaacctcgattttcagtccggttatgctgctgatatgttcggccttgatattgctgcgtttacggcgattgaaatggcggaaaacggcgacagctcccacccgaacgaaatcgcgtttagtaaaagtaataaagcctatgacgaagactggtccggcgacaaaagcggtataagcctgtataaagctgcggccaaatttaaatacggtccggtttgggcgagggcaggttacattcagccaactggtcaaacgctgttagcgccgcactggagctttatgccaggtacttatcagggggcggaagccggggcgaattttgattacggcgatgctggtgcgttgagtttctcctacatgtggaccaacgaatacaaagcgccgtggcatctggaaatggatgagttttatcagaacgataaaaccaccaaagttgattatctgcactcctttggggcgaaatacgacttcaaaaataacttcgtactggaagcggcatttggtcaggcggaagggtatatcgatcaatattttgccaaagccagctacaaatttgatatcgccggtagcccgttaaccaccagctaccagttctacggtacccgagataaagttgacgatcgcagcgtcaacgacctttatgacggcaccgcctggctgcaagcgttgacctttggttaccgggcggctgacgtagtggatttgcgcctcgaaggcacctgggttaaggctgacggtcagcagggatacttcctgcaacgtatgactccaacctacgcttccagtaacggtcgcctggatatctggtgggataaccgttctgacttcaacgccaacggcgaaaaagcggtcttcttcggtgcgatgtatgacctgaaaaactggaatcttccaggcttcgccatcggcgcttcctacgtttacgcatgggatgctaaacctgcgacctggcagagcaatccggatgcgtactacgacaaaaaccggactattgaagagtctgcctacagcctggatgcggtctataccattcaggacggtcgcgccaaaggcacgatgttcaaactgcatttcaccgaatacgacaaccactccgacatcccaagctggggcggtggttacggcaacatcttccaggatgagcgtgacgtgaaatttatggtaatcgcaccattcaccatcttctgatgcccgacgcggcaggttttgtgcctgccgcacgtttgaggaatttgctatgaaaaaactgattctcatcgccataatggcaagcgggctggtagcttgtgcgcaaagtaccgcgccacaggaagacagtcgtctgaaagaggcatacagcgcctgtatcaacaccgcacaaggtagcccagaaaaaattgaagcctgccagagcgtgttaaacgtgctgaagaaagagaaacaacatcagcagtttgccgaccaggaaagtgtacgcgtactggattatcagcagtgtctgcgtgcaacgcaaaccggaaatgatcaggcggtgaaagccgattgtgataaagtctggcaggaaatacgcagtaataacaaataagtgagagctgtaactctcgcttttcttatttcccttgcataaaaaagccaacccgcaggttggcttttctcgttcaggctggcttatttgccttcgtgcgcatgttcatcttcgcggcaatcgccttcggcacagtgaccgtaaagatagagactgtggttagtcaggcgaatgccatgttttgcggcaatttcacgctgacgcgcttcgatggaatcatcactaaattcgataaccttgccgcagtcgaggcagatcaggtgatcgtggtgatgttgctgtgtcagttcaaatacggatttaccgccttcaaaattgtggcgggtgacgataccagcgtcgtcaaactggttcagtacgcgatataccgtagccagaccaatttcttcacccatatcgatcagacgtttgtataaatcttccgcactgacgtgatggttgtccggctcctgaagaacttccaggatttttaaacgaggaagcgttactttcaggccagctttctttagggcggtattgttatcagtcatgcggaatctgtcctgttactaagcggttcacttcattagaagaagtgacagaatttgctcttgagataatgcgtatcattatagaattgccacgcctaaatgaaaaccacaagtccctggcaaatattgttaataaaaacgtggcacagcttacatttacaacggcaaggccacttgaacaccgggacattgtacaggtacaacagcaaaagttacaaatttgtagcaattattttgattggcattatctattaatacggcgtagacatgagtctacgccgcatcacatcaggcattgagaatttcgtcgagatgcaactcttcagaaatctgtttaacccatttttctacacgttcagcggtcagttccggctgacggtcttcgtcgatagccagaccgacaaagtggtcgtcatctgccagacctttacttgcttcgaaatgatagcccgcagttggccagtgaccaacgatggttgcaccgcgcggttcaatgatgtcgcggatggtgcccaatgcgtcgcagaaatattcggcgtaatcttcctggtcaccacaaccaaacagcgcaaccagtttgccgttgaaatcaatctcttcgagagtcgggaagaagtcatcccagtcacactgcgcttcgccgtaataccaggttgggatgcccagcagcagaatgtcataagcttccagatcttctttgctgctttttgcaatgtcatggacatcggcaacgtctttaccaagctgtttttgaatcatttttgcgatattttcggtattaccggtgtcgctgccgaaaaagatgccagtgatagccatgagtgaaataacctcttgaaacttattgaaatgggggtggaaaattgcccacggataaaggcaatcatagcagaacaggcagtcttgcggaatcagcaaacgagcaggactgcacactgtgctacatgaaagtggaaatttaaacgatgccctgactacgcagcgccgccagttgctgcattaacatctcttcgatcagttcgctacggctcatattgcggctctccgccagctcgttcagcgcctcgacagcttccgcgttcagcttcagttcgacacgcttaaggccacgtactttgtcgcgttttagctggttgcgtttattaatacgcagctgttcatcgcggctaagcggattagttttcggtcgtcccggtcgacgctcgtgcgcgaacagatctaatgtcgtacggtccgtttgttctttggccatgatcttggtgacttcgggggaaacaatcagccaggcctctgcccggatggatagcgcgccataatacatcagcgcgatgagtcacgccaacgcccacgcgcggaaagcgacgcggacgctgggtttttaatcagttgcgttaatcattgagatagcgacggatagcgcgtaataccgcatccggtttttcagcatggacccagtgacccgcgcctgcaatcacatgcgcccgtgcctgtggaaattgagccagtaaatcatcacggtactgctcgctaacatacggagaattgccgccagggataaacagggcagggtgatcccatgccgggattttctcccaacctacaatatgcggatactgatcccacaataccggcacgttaaagcgccactccccgtcaacaaaagatttcagcagaaactgaatcaccccttcttcattaagatgctggcgcattattgctgctgcttgctggcgagtttgtgcgtcgctttcactgaccgcgttgatagccgcaaaaatctcatcatgacggcgtacgtgatagtcgaccggcgcgatatcgatcgccaccagtttatcgatgcgatcggaggctagtgcagtaagtgccattaccgctttaccgcccatggagtgaccgataaatgttgctttgtcgatctgctgtgcatccagagtatcaacaagatcctgcgccatcgccgggtaattcattaccggatctctcggactaagaccgtggttacgcatatcaacctggatgatattgtgatcgtttaccagatcgcgagccagtacgccaaggttgtcgaggctgccaaacagaccgtggacaagaacgatgggagaattattgtgctggttttgtgcagtttgcgcgcggatattcaatttcatggcaaagttctttttttcgcgttgtcgggttagggtattatgttgaccattgtgccacagggctgcaacaaataaggtttattccgagtttttctgcaagccaggcttgacgctatccgctgccgggatttattcatatactcctggcgacttgtattcagctaagacactgcactggattaagatgaaaacgattgaagttgatgatgaactctacagctatattgccagccacactaagcatatcggcgagagcgcatccgacattttacggcgtatgttgaaattttccgccgcaagtcagcctgctgctccggtgacgaaagaggttcgcgttgcgagtcctgctatcgtcgaagcgaagccggtcaaaacgattaaagacaaggttcgcgcaatgcgtgaacttctgcttagcgatgaatacgcagagcaaaagcgagcggtcaatcgctttatgctgctgttgtctacactatattctcttgacgcccaggcgtttgccgaagcaacggaaagcttgcacggtcgtacacgcgtttactttgcggcagatgaacaaacgctgctgaaaaatggtaatcagaccaagccgaaacatgtgccaggcacgccgtattgggtgatcaccaacaccaacaccggccgtaaatgcagcatgatcgaacacatcatgcagagcatgcaattcccggcggaattgattgagaaggtttgcggaactatctaaaacgttgcagacaaaggacaaagcaatggcaatccacaatcgtgcaggccaacctgcacaacagagtgatttgattaacgtcgcccaactgacggcgcaatattatgtactgaaaccagaagcagggaatgcggagcacgcggtgaaattcggtacttccggtcaccgtggcagtgcagcgcgccacagctttaacgagccgcacattctggcgatcgctcaggcaattgctgaagaacgtgcgaaaaacggcatcactggcccttgctatgtgggtaaagatactcacgccctgtccgaacctgcattcatttccgttctggaagtgctggcagcgaacggcgttgatgtcattgtgcaggaaaacaatggcttcaccccgacgcctgccgtttccaatgccatcctggttcacaataaaaaaggtggcccgctggcagacggtatcgtgattacaccgtcccataacccgccggaagatggtggaatcaaatacaatccgccaaatggtggcccggctgataccaacgtcactaaagtggtggaagacagggccaacgcactgctggccgatggcctgaaaggcgtgaagcgtatctccctcgacgaagcgatggcatccggtcatgtgaaagagcaggatctggtgcagccgttcgtggaaggtctggccgatatcgttgatatggccgcgattcagaaagcgggcctgacgctgggcgttgatccgctgggcggttccggtatcgaatactggaagcgtattggcgagtattacaacctcaacctgactatcgttaacgatcaggtcgatcaaaccttccgctttatgcaccttgataaagacggcgcgatccgtatggactgctcctccgagtgtgcgatggcgggcctgctggcactgcgtgataagttcgatctggcgtttgctaacgacccggattatgaccgtcacggtatcgtcactccggcaggtttgatgaatccgaaccactacctggcggtggcaatcaattacctgttccagcatcgtccgcagtggggcaaagatgttgccgtcggtaaaacgctggttagttctgcgatgatcgaccgtgtggtcaacgacttgggccgtaaactggtagaagtcccggtaggtttcaaatggtttgtcgatggtctgttcgacggcagcttcggctttggcggcgaagagagtgcaggggcttccttcctgcgtttcgacggcacgccgtggtccaccgacaaagacggcatcatcatgtgtctgctggcggcggaaatcaccgctgtcaccggtaagaacccgcaggaacactacaacgaactggcaaaacgctttggtgcgccgagctacaaccgtttgcaggcagctgcgacttccgcacaaaaagcggcgctgtctaagctgtctccggaaatggtgagcgccagcaccctggcaggtgacccgatcaccgcgcgcctgactgctgctccgggcaacggtgcttctattggcggtctgaaagtgatgactgacaacggctggttcgccgcgcgtccgagtggcacggaagacgcatataagatctactgcgaaagcttcctcggtgaagaacatcgcaagcagattgagaaagaagcggttgagattgttagcgaagttctgaaaaacgcgtaaacacatttaataaaaaaagggcggtcgcaagatcgcccttttttacgtatgacaaacacagaattgcctgatgcgctacgcttatcaggcctacgaggatggtgcaatatattgaatttaagcgattttgtaggccggataaggcgttcacgccgcatccggcaaaaacaacgaacactttgtcaacaaactgagtagctcaaggaaatcccaatgaagaccaacaggagtctggtcgtcatagtgagtctaattaccgccacattactgctgactgcatgcgcccaacctgaacaaagtagtttagctggcgactggttactgacccctaaagataaaaccagaggattaacgggtagcattgcggtaaatattgcacctttccggtgtaagacaaattgccgtggtgataacttacctgataatacccgccgctggcagttgagtggcgggaacgaaaaagaacttacttatcttcataatatgagtgcacaagaaaaggtcggtttaaatcccggttggcaatgctacaccagtttttttatgcgggtttgccagggcaagcccggcactcgaccgatagtcaatgaggattatgtcagcgaaagcggattttttggcagcatgatgcatgtcgggattattgagttacgacgctgccagagtgaaaattgccagcaagaattgaaagcgataaatacacattaaaatagtgagtccgggaatgaaacccggacctgaacatgtcttattgcgtgaatgtttctttcatttgatactgcatttcccagagttcagtaaggctaataacttttcttgttcttgcttcttcactttgtacccataagaaagggtagaacgtgaaggcttccgttgcgcttaattttattacgtcttctcgccattgctgccatcgtacattttcatagaaggtatctaaatcaccggataatgcccactgaagaaactcagaatatccaacttccagactttcccaattcagcgtatctggcgcaaaataataaacgcagccagtatcttccccaagatcgccaccattaagagcaaaaattacccctgcgacatcgtcagcgatgggtaaagcccgcacgcctgcgaattcagggcgttgtgtccaacttactggatctcgtggcaaccgggggtgaccagatcctgctatgcgtaattaaccattatcaatcagcagacctccggagccatagacaagcgcacccatcggactttttgttgtcacctgtaattgataaagtgcggtttcggctaaatctttattaaccggtaagagttcggtatggtttgtggcgtcttttaaccagttctggattattggccaggcactatcttcagtatttactaactgattcatttcacgcatcgctacttgctccttgtgtgctacggtgtcatttatgatgaggaattgtatggaacattttttaaatattaagttccttatatttgaataaaaaatgactttatccatacattgccacttttttcaaagcataaaccgatacccaataccggtttcagtaataaaatggcgaggccgggccggatcctgttccagtttttgtcgcagatgccccatataattacgcaaatagttgctgtgttcgatcgcgtttagaccctacatctgccggatgcggcataaataacgaactatttgccaacaaacagaaagggcgatcattcaatcgcccttttttactttgttttattaaccgtgtttatttttcagttcaaagcgtggacttaccagaccatacagtgtccaaccaaggaaggtcacgatggaaccgtacagcatggcttcttccccggaactgtacagcgcataaaagctatacatcgcgccaacaaaagcaacaaagtttgcaactttcgctttactggggggcacattagcgaccttctgaataatgactaatgccgccatactcagaatatacggaatgatattggtcaccacggccaggttaaccagcacgttgaactgactgtttaggctcgggctaatggtcatcagtgccaatccactctgaataatcacaatggtcaacattccctgcaccggtgcatccactttggttacacgggagaaaattttagggaagtagccttcatcagaactagatttaaacacctgggcaatggtgaactgccagccaagtaggctaccgcagcaggacatcaccatcagcgccataatgactttacccacttccggcgtgaacatctgcgcgaaggccagaccaaatggtgccgtactatttgccagctccatatttggcacaatcccggcaatcacgttggtggagacgatataaatcaccgccgcacctaacgtaccgccgagtaccgcgattggcacattacgttccgggttttccactacatcagtattcgcacacgcagactccagaccaagaaaagcccacagcgtcatagcgatggaagaacctaccgcactgaagaacggtgcatgatgcggattccaggaatcaacgtacagcgtcgggctaaaccagaaccagccaataatgcacagaccgacgaccggaataatgaccccccacacggtaatgctactgatttgcccggtaatgcgcgcaccaccaaagttagccacggtacaaatccacagcaccccgatggtcgcaagaccaatctgcactgggctcaaactcgcgccgagcagttcggtgccgtaaccaaccgcgctaatagcaatcgcgacgttagcaatcagcagactgacgccgtaggtatagttcgccataaagttaccggatttaccgaaagcatactcggcataaccgcccataccgccacttttacggctgaacataccgcattttgcgaatgcccatgccagtgccatactgcctacggctgtcaccagccaggagataatactgattgtcccgacttcggcaagctttgtcggcagcatgatgataccggagcccatcatgttgaccatcgtcagtatggttaactgaacgacgcccattttgttgcttttagcctgactcataatttttcccctttcaacagggtgctttgcgcatcacgaggcttgatgacatagcaccaaacttgcttacgaccatcatgttcttcgatatagacaccctgcagctccggtgcaaaacctggcagcaggttgatcccttcttccagagcgctgaagtaacgcagaacagcaccaccccagatttcacccggaacaacacacagcacacccggaggataaggaagcgcaccttcggcagcgatacggccttctgcatccggcagacgaaccagttccacttcaccgcgtaaataggcgtagttggcttcttgcggattcatgctgacgcgtgggaagtgctccttacggaacatctctttttgcagttgtttcacgttgtggcgggcatacaaatcatgcatttcctgacacaactgacgcagggtataaccggcgtagcgctcttcatgctgtttgtagatggaaggtagcacttctgctaatggcgcgtcggactcaagcagtttttcgaagcgtaccagcagggcaacaagttgctgaagtttggccatatcttctgccggagtcagcaggaagaggatggagttaagatcgcatttttccggcactacgccattttcgcgcaggaagttagcaagaatcgtcgcgggtacaccgaacgcttcatattcgccgttacgtgcatcaatacctggggttgtcagcaacagtttgcatggatcgacaaagtattgattctctgcatagccttcaaaagaatgccagtgttcccctggtacaaactggaagaagcgcagatcaaccgcaatttgcgctgtttcatagctctgccagggtttaccatccaccagttcaggtacgaacggacgaatatgctgacagttatcgaggatcagtttgcgggcattaatgccatttaccacacaatccatccacatattacgaccgctgacaccttcatgcattttggcgttgatattcagtgcggcaaacagcggatagaacgggctggtggaggcgtgcatcataaaggcgttgttcatgcgtttgtgcggtacataacgctgttgccctttgatgtggctgtcttttttatgaatttgactagtctgagaaaaaccagcctgttgtttatgcacagattgcgtaaccagaatacccggatcgttctcattaagatccagcaacagcgggctacagtccgccatcatcggaataaactgttcatagccgacccatgcactgtcaaacaggatgtagtcacacagatgaccaattttatccaccacttggcgggcgttataaatcgtaccgtcgtaggtgcctaactgaatcacagcgaggcggaaaggacgagcctcttttgcccgctgcggtgcgacttccgcgatcagctcacgcaggtaactttcttcaaaacagtgcgcatcaatgccaccgataaagccatacgggttacgtgccgtttccagataaaccggtgttgcaccagcctgtagcaacgctccgtggtggttagatttgtggttattgcgatcaaacagcaccagatcacccggtgttagcagggcgtttaaaaccactttgttagaagaactagtgccatttaaaacgaagtaggttttatcggcattaaacacttttgccgcatgttgctgtgcaatgcatggcgcgccttcgtgaatcagcagatcgcccatcgctacgtcggcgttgcacaagtcggcacggaacagcgcctcaccaaagtattccacaaactgattccccgccggatggcgacggaaaaattcgccgccctgatgaccagggcaatcaaacgcgctgttaccttgattgacataatcgaccagtgcgcggaagaaaggtgggcgcagttgagtttcataatggctggcagcggtttctaactggcgaccataaaattctcgtcggctttcgcaattctcaaagacaccgctaatacggggcaaatactctgcgggtacacgttcttgattttcagtagcaataaataccgggatgccataacccgtggcatcgatttcatcgagttttccgcatgtaacatcgttgaggcttaaaactattgccgccacatcgatattacgactttcattaatgtagatacattctcgctgcgtggtaaaacagtccgggcaagaatcactaaccgcaatttttaatttactcatttttcatctctttattttaggtaatagcaggtcctcaatttctcgaatgagaaatcgatcgtgccggaaaaaagcaaagttaccccgctgataaataaatcaggtagattgcttttttcagaatgcagaaacccttaccagtcaggtggctgataatacaagggttaacagagaatgagcactgcggaatacaggcatatgcctgtaatacagagagtcaggaagacctgtacgctgaagtgcccttagtcggtagactaacgggcattgaagaagtgaaagtcgaagctattgcgatgagcaaacttcataatatgagttgtccgccttatatggggcatagtgcggctgttattttccatttaatttacctttcctgatgtgaatgaaggtgaagatattctatccaggaaatacggttgaactgtgaaggtgatcaataaaaaatgatcaatcttaatttatttaatgatgagctttttactcagtaatataaaatattgaattgttatttttgtgtgttgtttaagataaaaagccgtatttattattacggctttaattaataaaaggcaggctgtattaaaattaatattcaaagcataaaccgatagccaataccggtttcagtaatgaaatggcgtgggcgggcgggatcctgttccagtttttgtcgcagatgtcccatataaatacgcaaatagtgactgtgttcgaccgcgtttggcccccacacctggttaaggagctggcgctgggtgagtacttttccggcattgttgagcagcaccgccagcaggcggaactcaattggtgtgagatgcacctcttcctcaccccggtgaatcacgcgggcggctaaatcgacggtaacatcggaaaattttaccagcggatcgggcgcggtggtggcagagtggcggcgtaatgcgacgcgcagacgggcctgcaattcgccaatgccaaacggcttactcagataatcatccgctccggcatccagcgcggcgattttgtcgctctcttcgctgcgtgcggaaagcacaatcaccggcaccgcgctccactggcgcaggtcgcggataaactcaatcccatcaccatcgggcaggccgagatcgagaataatcaaatctggcttacgggttgccgcttccagcaagccgcgttgcagcgtttcggcctcaaagacgcgcatcccgtcgccctccagcgccgtgcgcagaaagcgacgaatagcctgttcatcttcaacaatcagaacgtttgtcacatatcctcatgaaattcttcaagttcaggggcagtttgctggggaagtgtaacacgaaaacaggcaccaccttccggtcggttgaacgcggtaatagtgcccccgtgtacatccactatcgcccgacaaattgccagtccaagccctacccccggtactgcgctctctttattcccgcgagcaaacttatcaaatatcgtctgctcctggcctggcggaagaccggggccgttatcccagacatccagttgtagattttcgccctcaacgtgggcatcgataccaatttcggcctgcgcacccgcatatttcaccgcgttctccagcagattaatcagcacccgttcaaagagtggcccgtcaacgtggattaaggtcagcggttctggcagagaaagattgatggggctgcttaaacccggttccagcatttgcagcgcgctgccgactacttcttccagcgttaaccactctttcttcaaattaaagccgccggactgaattcgcgccatatccagtagattattcaccagtcgggtagtgttcagcacatgctgacggatctcgctggcctggcgggcgtggggacttccttcgcttgccagatcgagcgttaagatttctgcctgaccaaacagcaccgtaagcggcgtgcgtaaatcatggctaagcgccgccagcagggcgttgcggatctgttcacgttcgcttgccatccgcgcctgttcttcgctggcggttagcgtcagccgctcaagggcattggcgactaacagcgtaaacgtctccagcaggcgctgctgttccgggatcatcaactggcgcagattccccggctccaccaccaccagcccgtaggttttctcgccgctttttagcggcaaaatctggtacggtacaccgggtaacgtgtcggtgcccgcgcccgcaggcaggcctttatcaaaactccactgcgcgatggcatcgtcccacggcgtcattccttgcggatgtgttaacggctgcaatttaccgttgtcatcgggcaacaacacctgactgcgggcatgaaacgtggaggcaataaattgttcgctggtggcagcgatatcctgcggactgcggcccaccgccagagctttgctcatttcatataagtgccgtgtgcgttgctcgcggtaacgggctacccgcgcctgataacgcacgccagcagtaaggttcccgatcaccagcccgacggttaacatcaccgcgaaggtcagcagatattgcacatcagagacggcgagcgtgccgcgtggggcgataaaaaagagatcgaaactcactacattaatgacggtggcaaccacactaggccagcgtccataaaatagcgccaccaccaccacgccaagcagatacagcatcaccaggttggcggcatcaaacgccatcagccactgcatggcaattaaggtgataacggcgcataacgcggcggcaaccacgcatccctgaatttgtacacgccacttgtctttaaaagagcggttatccggcgcgttgttaatcgtgcgggcgggtggttcatcaagcgcgaccagcacctgatcgagatcgggggcgatgcgcgccagtcggtcagcaaacgtttcccgacgccaccagcggcggctggccgggcgaccgagaataatcttgccgagattatgttcacgggcataacgcactaccgctttctcttccgctggatcagaaagtgttgccgtctccgcgcccagttcctgcgccagacgtaaggcgctgagaattgcccgacgttttttttccggtaagcggtgcagggcaggggtttcaacatacaccgcgtgccagacgctacccagccgactcgccagccgcgccgctgcgcggaccagtttttcgctgccggtgttatggccgatgcataaaaggatcgcgtcgcgcgtgcgccacactttctcttcgccaggatgcccccgccaggcgcgcatttgctcatcaacgcgatcggcagtacggcgcagtgccagttcgcgcagggcgatcagattacctttgcggaaaaaatgttcaatggcgcgctccgcctgcccggcaatatagactttgccttctttcagccgctggcgcagatcgtccgggggcaagtccaccagcaccacgtcgtcggcggcatcgaaaaaaggatcgggcacggtttcccgtacctgaattccggtgacgccgctgaccacatcattcagactttccagatgctgaacgttgacggtagtgaaaacatcaatgccagcttccagcagttcttcgatatcctgccagcgtttgggatgacgggaacctggcgcattactgtgcgccagttcgtccattaagatcagcgccgggcggcgggcgagggcggcatcgagatcaaactcgctgatatgccgcccacggtacgcctggcgttttaacggcagaacagccagcccttccagcatggcggcggtatcttttcgcccgtgggtttctaccacgccaaccacaatatccagcccttgcgcccgcagtcgctgggcttctgccagcatcgcccaggtcttcccgacgcctgcacaggcaccgaagaaaactttcagcttcccccgatgcggcgcggcagtttgttccagcagacgatcggggtcgggacgtaagggttcgttattcatcaagtttatccagcgccagattgagttcaacaatgttgacaaccggctggccgatatatttcaccagcggttgttggctgtattttgcgatcagttgcgtgagctgttcaacgctgagattacgcgctttcgccacgcgtgggatttgccaggccgccgcttgcggggtgatattattgtccagcccgcttgcgcttgccgtcaccagttcaaccggaacgctcgcgctggcatccgggttagcggcccgtaatgcagcaacgcgtgcggctattagtttatccagctcagggttactgaccgccagattgctcccgccagaagcctgtggattatagggcatttctgccgttgcgctcgggcgaccatgaaaatagccgttgccggtaaaattctgcccgattaatgcgctaccgcgcaccgtatcaccttcacgaatcaagctaccattggcctgccagggaaaccaccattgccccagtacggtggtcagcagcgggtaaacgccgccagtaatcaataacagaaagataaatgtacttaatgccggacgtaatccactcatggtaaacctcacaccagaccgcaaacggtcagcagtaaatcaatgactttgataccgataaacggcaccagcagcccacccagaccgtaaatccataagttacggcgcaacatggcagaagcggtaagcggtttataactcacgccttttaacgccaggggaatcaaaaagacgataatcaaggcgttgaaaatcaccgcactgaggattgcggagtcggggctatgcaggcacatgatgttcagcgcatttaactgcggatacgttgccgcgaatgccgccggaataatggcgaagtatttcgccacatcgttggcaatgctgaaggtggtcaggctgccacgggtcatcagcatctgtttgccaatgtgcaccacctcgatcaacttggtcgggttagagtcgagatcgaccatattgcccgcctctttcgccgcctgggtgccggagttcatcgccaccgcgacatctgcctgcgccagcgccggagcatcgttggtgccgtcgccggtcatcgctaccaaacgaccttccgcctgatactgacggatcaatgccagcttggcctccggtgtcgcttcggcgagaaaatcatcgacacccgcttccgcagcaatcgcggcggcagtcagacggttatcgccggtaatcatcaccgttttaatgcccattttgcgcagctgggcgaagcgctctttaataccgcctttgacgatatctttcagcgcaataacgcccagcacacgagaaccttccaccaccaccagcggcgtggctccctgacgcgcaacctgatcgactttttgatcaacatcggtagggaagtgaccaccgttagcctcaacatggcgacgaatggcatcgacagaacctttacggatcatgcggttgtcgatgttgatcccgctcatccggctttgcgcagtaaacggtacaaaggtggcatggaggctctgcacatcgcgctcgcgcaggttaaaacgctgcttggcgaggatcacaatactgcggccttccggcgtttcatcagccaggctagccagttgtgcggcgtcagccagcgttttttcatccacgccctgcgcggggataaactcgctcgcctgacggttaccgagtgtgatggtgccggttttatccagtagcagaacgtcaacgtcacctgccgcttcaactgcacgtccgctggtggcaatcacattcgcgcctagcatccggctcatcccggcgacgccgatcgcactcaacaggccgccaatagtggttgggatcagacagaccagcagcgccaccagtaccgttacgctgactgcattaccgccccacgcggaaaacggccacagcgtggcggttgccagtaaaaagacgatagtcagggcaatcagcagaatggtcagggcaatttcgttcggcgttttgcgtcgctgtgcgccttccaccatcgcgatcatccgatccagaaatgtctcgccggggttaacgctacactcaatcaccagccagtcagaaagaatacgcgtgccgccggtgacggaggcaaaatcgccgccggattcacggatcaccggtgcgctttccccggtgatggcgctttcatcgacgcttgcacccccttcaataacttcaccatcgcaggggataatatcgccagcttctaccagtacgatatcgcctttacgaagttggtcggcaggaactttgtccgccgcagcgccatatttcggctcacgcagcttgcgggcaaaggcagtttttttcacccctttcagactgttggcctgcgctttactgcggccttctgccagcgcctcggcgaaattagcgaacagtacggtgatccacagccaaccgctaatggccgcgctaaacagcgcattgccgggcatcgcaccgcttgccatcgcgatgctaatacaggtggtcagcagactgccgatccagacgataaacatcaccggattgcgccattgcgcctgcgggtttaattttttcaccgcttctttcagcgcctgaacgacaagtgttggttcgaatagcgccagttgtttacgactcatattcagtgctcactcaatatcatcaggagagatattccgccaccggaccaagcgccagggcagggataaaggtcagtgcgccaaccagcaacacggtgccgattaacaggccaacaaacagcgggccgtgcgttggcagcgtgccggagctggcggcttggctctttttactcaccaggctaccggcaattgccatcaccgggataatcaccccgaagcgaccgacaaacatgcagaacgccagtaaacagttccagaacggagagttggcgcttaatccggcaaaggcgctgccgttgttgttagcggcggaactcacggcgtacagcacttcgctaaaaccatgcgggccagggttgagcatggcgctacgtccggcgtcggtcatcatcgccaacgccgcgcccatcagcaccagcgtcggggtaaccagaattgccagtgcagtcagtttcatctcgcgtacgtcgatttttttacccagatattccggtgtacgaccaatcatcagcccggcaataaacaccgccagcaggacaaacagcatcatgccgtaaagaccagaaccgacaccgccgaacaccacttcaccaatttgcatcagccacatcggcaccatgccaccgagagcggtaaagctatcatgcatcgcaatcaccgcgccacaggaagccgccgtcgtcacgaccgcaaacaggctactgaccagcacgccgaaacggctctctttaccttccatattgatgctgctgtccgtgcccagtgccagcagatgaggattaccctgaacttctgcccacatcaccacgcctacgcagatgacaaaaatcacactcatcgcccacagcaacatgcgcccctggcggcgatcgcccatcacttcaccaaaggcaaagcacagcgccgttgggatcaagaagatcgccagcatctgcacgaagttggtcagtgcggttgggttttcaaacggatggctgctgttggcattaaagaagccaccgccgttagtaccgagcatcttgatcgcttcctgagaagctacaggccccatgggtaacagctgttgcgctccttcaacggtattcacagcctgataaggcagaaagttttgcagcgcaccttgttgaataaaaaacagtgcaatcaacaacgccacagggactagcacccataacgtgatgcgtagcagatcgacccaggcattcccgagcgtgctcatgctctggcgggtaaacgcacggatgagggcaaaaatcaccgcaatcccgctggcggcagaaagaaagttttgcaccgttaagcccgccatctggctgaaatagctcaacgtggtttcaccgctataagattgccagttggtattggtgacaaagctgacggcggtattcagcgccagatcccagctcagccctggcaactgctgtggattaagcggcagatagtgctgaccgagcaacataaaaaacagcaccgccagccccagcatgttcaggccgagaatggcacaaagatattgcttccagttcatctcacggtcagagacgccaagtgcgcgaaaaagtacgcgctcaacgcccgttgtaccgggaagaggaatgtcattaatcagccgcgccagcccgctgcctaaaggacgcgccagcaccattaacaccagtaaaaacgtggcgatcagtaagaacccttgcgcagccatcagaacgcctccgcattgatcagggcataaaccagataacccagtaataaaaacaccagcaatacgccggttatcacgcctgcactcacagtgcacctccagtggcctaaaagtgataccggaagggtagaattctggctgcaaagatttcgcaaaaatctgcgggcggggtgtaaaaaaagtataaaaatggcaaaagccatgatttaactaatgtttagtattaatttaacttttgtgtaacttaattacaggatgaatgtaaataaaccatcaataagcaaaaataagtggtcggatgagtagtaaaattacacaaaaggcggtactattttcatcagataaacaaattcatttttccggtgccattcaccgggtagatacaaaagggggagaaaagtatggaactctacagagaatatcctgcatggcttatctttttacgccgtacttatgcggttgcagcgggcgttctggcgctgcctttcatgcttttctggaaagaccgcgcccgcttttacagctacctgcatcgcgtctggagcaaaaccagcgataaaccggtgtggatggatcaggccgaaaaggcaactggtgatttttattgattgctgagttttgaatacattgaacgtctacacttactcctgtaaaccgctcaggagcagtaatgaatctacaacgatttgatgacagcaccctaatccgtatctttgcccttcatgagttacatcgactgaaagaacatggcttaacgcgcggggcgcttctcgattatcacagccgctataaactcgtctttctggcgcattctcagccggagtaccgcaaacttggcccgttcgtggctgatattcaccagtggcaaaatctggatgactattacaaccagtaccgccaacgcgtagttgttttgctttctcaccccgccaacccgcgcgatcacaccaatgttttgatgcacgttcagggttattttcgcccgcatattgattccacagaacgccagcagctggctgcgcttatcgacagttatcgccgtggcgagcaaccacttcttgcgccgctgatgcgtatcaaacactatatggcgctttatcctgacgcctggcttagtgggcagcgttatttcgaactttggccgcgtgtgattaacttgcgccatagtggagttttatgactacccatctggtctggtttcgccaggatttacgtctgcacgataatctcgcactggctgccgcctgccgcaatagctctgcacgcgtgctggcgttgtatatcgctacaccacgccagtgggcgacgcataacatgagcccgcgtcaggctgaacttatcaatgctcaactgaatgggctacaaatagcgcttgcggaaaaaggtattcctttattgttccgtgaagtggatgactttgtcgccagtgtcgaaatagttaaacaggtgtgcgcggaaaacagcgttacccacctgttttataactatcagtatgaagtgaatgagcgggcgcgggatgtggaagttgaaagagcgctgcgtaacgtggtgtgtgaaggatttgatgacagcgtgatcctgccgcctggcgcggtgatgaccggtaatcacgagatgtacaaagtctttacgccttttaagaatgcctggctgaaacggctgcgggaagggatgccggagtgcgtcgctgcgccaaaagttcgtagtagcggaagcatagagcccagcccatccattacgctgaattatcctcgtcagtctttcgatactgcgcattttccggtggaagaaaaagcggcgattgcgcaattacgccagttttgccagaacggtgccggagaatatgagcaacaacgagattttccggcagtggaaggcaccagccgtttgagcgccagcctggcaacgggcgggttaagccctcgccagtgcttgcatcgcttgttggctgaacagccgcaggcgctggacggtggggccggtagtgtctggcttaatgagctgatctggcgcgagttttaccgtcacctgataacgtatcaccccagcttgtgtaaacatcgtccatttattgcctggacggatcgtgtacagtggcagagcaatcccgcacatttacaggcctggcaggaaggcaaaacgggatacccgattgttgatgccgctatgcgtcagcttaacagcactggctggatgcataacaggctacggatgattacagccagttttctggtgaaagatttattgatcgactggcgcgaaggcgagcgatatttcatgagccagctgattgatggtgatttggcagccaataacggtggctggcagtgggccgctagtaccggaaccgatgcagcgccgtattttcgtattttcaacccgacaacccagggcgagaaatttgatcatgagggcgagtttatccgccagtggctaccggaactgcgcgatgtgccagggaaagtggtgcatgagccgtggaagtgggcgcagaaagcaggtgtgacgctggattatccgcaaccgatagtcgagcacaaagaagcgagagtacaaacgttggcagcgtatgaggcggcgcggaaggggaaataacagacgcgtcaggcaatcgagcccagatgccggatgcggcgtgaacgccttatccagcctacaaatttgtgcaaattcaataaattgcaggaaatacgtaggcctgataagacgcgtcaagcgtcgcatcaggcatcggtgctggcctattaagactccagcgccagcgcgcggtttctgaatttcagcgcctgatacagccaaatcatcagtaccagtcctacacacgccagtgcgccccaggtaatttgatcaaatacttcaatatatgcattgatggagtagttgatcgccccggaagcatcaaagctagcctggcttgtctgatcggcaatcacgcccgccagatagttcgcgatcgcgccagaaagcagcatgtagatgccggttaatacgccggtcacaccggggatttcaatgcgcgtaatttggctcatggcaaccgggtcgataaacagttccgcaaagcccatcaccgccaggcctaataccatcagtggcagagaagagtgaccatacattgcggaccagcgggcgcttaaggtcagaatgcagaatccggcgctcatcaggccaaggccaagagcaaatttcccccagatgcgcacggtacgattacccgcgacactctcttttaccacccacgccaggaacacaccgcacagcataactgcgaaggcattaatgctctggaacatcgcggtcggaacggtataaccaaacatatcgcggttaacgaagcggtcgatataaaggctaatgctgctaccgccctgttgtgcgaaggcccagaacaacatactgaagaaggtgagcgtcacaatcagccccagctccttccgctgtttctggttttctgctttgcgataaatttttgccagtacacccaggccaataatagtcgcgacaattaaggcgtatacgctccactctttccagaacagtatggtaatcagtgcaggcgttgccaccagcagaaccagcagccatccccagttcggcaggagaaagtttgtcgcacgcagtacttttttgttaacgccgcgggtatgagtgaaatgacgattgccacataagaaaatgaccagacccgcgatcatgccaaccgccgccaggccaaagcccatcgcccagctgtactcttcctgggcgtaaccacaggcgataggtgcgataatagaccccacgttacccgccgcatacatcaggctgaaaccgccatcacgacgcggatcggttggctcatacagctcgccgagcagacagcttacgttagatttaaacaggccatagccgcagacgataatcgccagggacagatagaggaaactcggatggatctcactggcacccagcaccacatgaccgatcgccatcaacaacgcccccagcatcaccgccatgcgattgccgagaactttatccgccaaaaagccaccgaggattggcgtgacatacaccaggctacagtaggcgctaaataactcgtaggcgtgagtatcgttgtattttagttgattggtgagatagagaatcagcagggcacgcatgccgtaaaagctaaaatattcccagatttgcagcgcaacgacatagtaaatagcgcgcggctgacttgcgtgtttattcataataattccacaattgacggcaacgtcacgtaatagttgcgcggcgtgcttgtgtttccttaaagttaaaactttgatacagatctgattatttatgcaatatgctgtctgattgcataaatatacattagctgaagcgtgatgatataaacaatttgcgtcttttggcgtcgggtttgtttcttaatatgtcaaaagattggctatcgacgaactggcgaggtaacgctatgttaacggtgtagctatcagaatacggaaggcgcgaagatgaaaaacaccgaactggaacaactgattaacgaaaaactgaacagcgcggcgattagtgattacgcgccgaatggtttgcaggtggaaggcaaagagacggtgcaaaaaattgttaccggtgtcaccgccagccaggctttgctcgatgaggcagtgcgtctgggcgcggatgcggtcattgtgcatcatggctacttctggaaaggagagtctccggtcattcgcggaatgaagcgtaaccgtttaaaaacgttgctggcgaatgatatcaacctgtatggctggcatttgccgcttgacgcacatcctgagctgggcaataacgcacagctggcggcgttactggggatcacggtcatgggcgaaattgagccgttggtgccgtggggcgaactgaccatgcctgtgccgggactggagctggcttcctggattgaagcgcgtctgggacgtaagccgttatggtgtggcgataccggacctgaggtggtccagcgcgtcgcctggtgcacgggcggcgggcaaagttttatcgatagcgccgcgcgttttggcgtggatgcttttattactggcgaagtttctgaacagaccattcatagtgcccgcgagcagggattgcatttttatgctgcaggtcaccatgccactgaacgtggtggtattcgcgcattgagcgagtggctgaatgaaaataccgatcttgatgtgacctttattgatattcctaatcctgcataacgaataatcagagggatcgaaagtgcaacgagcgcgttgttatctgataggtgaaacggcggtagtgctggaactggaaccgccggtgacgctggctagccagaaacggatctggcgactggcgcagcgtctggtggatatgccgaatgtggttgaagccattcccggcatgaacaatatcacggtgattttgcgtaatcctgagagcctggcgctggatgccatagagcgtttgcaacgctggtgggaggagagcgaggcgctggagccggagtctcgctttattgaaattccggtggtttacggtggtgcaggcggaccggatttggcggtggtcgcggcgcattgcgggttgagcgaaaaacaggttgttgaattgcactcctccgtggaatacgtggtctggtttttaggttttcaaccgggcttcccgtatctcgggagtttgccggaacaactacacacgccacggcgcgctgaaccgcgcttactcgttccggcaggttctgtcgggatcggcgggccgcagactggtgtttatccgctggcaacgccgggtggctggcagttgattggtcataccagtctcagcctgtttgatccggcgcgtgacgaacccatcttattacgtccgggagacagcgtgcgctttgtaccgcagaaggagggagtatgctgaagattattcgtgcgggcatgtataccactgtgcaggatggcggtcgtcacggttttcgccagagcggtatcagccactgcggcgcactggatatgcccgcgttacgcattgctaacctactggtgggtaatgacgccaatgcccccgcgctggagatcacgctcggtcagttaactgttgagttcgaaactgatgggtggtttgctctgacgggtgccggttgcgaagcgcggctggatgataatgccgtctggaccggctggcgattgccgatgaaagcaggccagcgtttaacgcttaaacgcccgcagcacgggatgcgcagttatctggcggtcgcgggtggtattgatgttccgccggtaatgggcagttgcagcaccgatctcaaagtggggattggcgggctggaaggccgtttactgaaggatggtgaccgactcccgattggcaaaagcaagcgtgattctatggaagcgcagggcgttaaacagctgctgtggggcaaccgcattcgcgccttgccggggccggaatatcatgagttcgatcgcgccagccaggatgcattctggcgtagcccctggcagcttagcagccaaagtaaccgcatgggctatcgcttacaggggcaaattttaaaacgcaccaccgatcgcgaactgttatctcacggtttgttaccgggcgtggtgcaggtgccacataacgggcagccgattgtgttgatgaacgacgcacagaccaccggtggttacccgcgtattgcctgtatcattgaggctgatatgtaccatctggcgcaaattccgctcggtcagccgattcattttgtccagtgtagtctggaagaggcactaaaagcacggcaagatcagcaacgttattttgaacaattagcgtggcggctgcacaatgaaaattgacctgaacgccgatctgggcgaaggctgcgccagcgacgcagagctattaacgctggtttcctctgccaatattgcctgtggatttcatgcaggcgatgcgcaaatcatgcaggcttgcgtgcgtgaagcaataaaaaatggtgtcgcgattggcgctcacccgagttttcccgacagggaaaattttggtcgcagcgccatgcagctgccgccagaaaccgtttacgcccagacgctgtatcaaattggcgcgctggcaacgattgcccgtgcgcaaggcggcgtaatgcgtcatgtcaaaccgcacggcatgttgtacaaccaggcggcgaaagaagcacaactggcagacgccatcgccagagcggtatacgcttgcgatccagcattgattctcgtcgggctggcgggaagcgagctgattcgtgcaggcaagcaatatggtctgacaacgcgcgaggaagtgtttgccgatcgcggttatcaggctgacggcagcctggtgccgcgaagccagagtggcgcgttgattgaaaacgaagaacaggcgctggcgcaaacgctggagatggtgcaacacggcagagtcaaaagtatcaccggcgaatgggcaacggtcgcggcgcaaacggtctgcctgcatggcgacggcgagcacgcactggcgttcgcccgccgactacgctctgcatttgccgaaaaggggattgttgtcgcagcataaccccgattaataaagaatgaaaaaaggatatcaccatgcctgaaggcccggagatccgccgtgcagcggataacctggaggcggcgatcaaaggcaaaccactaactgatgtctggtttgccttcccgcagttaaaaccttatcaaagtcaacttatcggtcaacacgttacccatgtggaaacgcgtggtaaggcgttgttaactcatttttccaacgacttaacgctctacagccataatcagctttacggcgtctggcgcgtggttgataccggcgaagagccgcagaccacgcgagtattgcgggtaaaactgcaaacggctgacaaaaccattctgctttatagcgccagcgatattgagatgttgaccccggaacaactgaccacgcatccgtttttacaacgcgttggtcccgatgtgctggatccgaatctgacgccggaggtggtgaaagaacgattattgagcccgcgctttcgtaaccgtcagtttgctggattactgctcgatcaggcgtttctggctgggcttggcaattatttgcgggtggagatcctctggcaggttgggttgactggaaatcataaagcgaaagatctcaatgcggcgcaactggatgcactcgcacacgcgttactggagattcctcgattttcctacgctacgcgggggcaggtggatgagaataagcatcatggggcgctgtttcgctttaaggtttttcatcgagatggcgaaccgtgcgaacgttgtggcagcatcattgagaaaaccacgctgagttctcgcccgttttactggtgccctggctgccagcattaagcgctccgcttcggcgcataggtactaataaaccgcgcaatggcaggccctgtcagcaaaatactgaacaggcgtagggtttgcatcgccataatgagcgccatatcggcattgctccctgcggcgatgaccgccacggtatcaagcccgccggggctggtggcgaggtaggcagtcataaaatcaatgtgcataaaccgggtcagcccccacgccatacccgcacaaatagccagcagagcaaaaatgctcagcaggatttgcggtagcgggcgtagtgcccgcagtaagatttgtttatcgaaaccaagaccaatccgccagccaattgccatatacgccatcgccagcagccattccggtagttcgatggtgatgagctgaccagactggagcactgcgcccgccagcatcgggatgagcatcgtgccggaaggaagacgcagcaggcatcccactgtaccggcaacgaccgcgagcaaaatagtaagcaggagattaatgctcactggcgggaaccagacgatatgctggttaaccgcttcagcgttatcgcccagcatcatgcgggtgaccagaacagcggcccccgcgacgaacagcactcgcagatattgcataaacgccaccaggcgaatatctgcgccgtaatcttgcgccatagcgaccattgccgccgcgccgccaggagaggagccccaggcaccggtatttccaggcaaactgctatagcgcaccaataaccaacccacaatggcgctggaaagcagcgttaccagtaaaattgcaagcacgatcggccagttgacggccagggtggtgagaatgctaccagtgaggttttgcgcaatcatgcagccaagaatggcctgggcggcgagaaaagcagagcggggaagttgcagagtaattccgcgcatactaaagatgatcccggcgatcatcggcccaagtaatagcgccgccgggagatgtaccgcgaggaaaccaatagaaaggagaagacttagcacacataacattccccactgcaaaactggcatccttcgctccctcattattttctctttggtgtatcgatacagcataaagaaagctgggccaggaaaaaataacagcaatcaaggaaaaggggaaaatcagcaattttctgaaagagatgccctttccggcggcaaagggcatcatggtaaatcagttatagttaatcttaaaaagcaccactgtatcgaaggggccagcctcgatgggggtgcctggaatggagctaagttcagccgtataggttttttcgtagaccaacatgtcactggtgaaatcggcgtattcagcatatttattgaaggtataagggctggcgttttcatccagtaaacgtagcttcagaccattaccaatcaacaatgctttatcttcttcaaccaacgtttcttcggtataaaaggaggaactgactttaaatccgtcggtgcattgatcgttttggctcttggtcgttttaatactgaacgttttgctcattgtgtggcgacgtatatccagcaaattaaatttaccaaaatcaatcacctgtgtttccggactaatggaaaaattgacgctgcaatccagcacgcgaatgttttccagaccagtaatatgatatttcaggttttgggcagtagggtcttcgttaacgctaccggcaccgtcaaattgcacgacgatatagtcgctaagcgtactttgataatcatgcggcggcatttctcgtattttgacgtataaccgcatgcgagcgagaaaggtacggctcatatgaatattagcgggatcgccgctgcaaattttgttctgccatcccatcgcgatgatctgctcaggggtataaatatcaatgttcttactgtcgatacactggttagtgtcgatgcgactttttcccagactggcatcgtaatcgacaccgttgtatgtcacgccgagttgataataacgatcctgcacccccggataggggtttacccaggcgtagacatgctcgctttcaaagttgccgttggtattgttgtcacaatagacgggaattttaatatcgtcagattcccagatcttatcaccgggtttggcattgcctggtacagcaaacggttgaatcgcttcacttttttctactgcgccaccagatgtaccaaaatagcagttcagcgccattgcagacttcaacggcagaaataacaggcagatgacgagcaacaatcccttgccagcactcatttcgcctccactgcttgtaaacggcattgtccgctgcagttgagcgtcgtcatgcgtaatgcgccgtaatcatccatgtaaccgagataaaactggctgccgctataacttccggtgtttgtgttgaccgtactaaaaggtgcaaccatcacggttttgaagcctgggagaacgcctttttcatttctccccagataggcaatggtcagataatacgcggtaggatttttcagtgtcagttggttgccctgctggctgacctgtaactgcagttcgaccttttctcctgctttcttgcgtaatgcagccggtcgccagaacaatttaatacgactttgaatagcgacctgaagtatcgcatggtcgctgcttttatccggagcgggaggaatttcgcgcatattgtagaaaaatagcgtttcgcgatcgccaggtaattgtgtggtactggcttgtttcacaacccgcacctggcttgtcgctttcggttccagacgttgaatagggggcaaagcgaccagaagagcatcgcttttctcccctttttcattttctatccaggaataagcaagataaggcagtttgtcactttggttttcgatacgcaggctggtggctttgtcattggcgttaaacacaatgcgtgtgcgatcgggttgcaccgcagcattgcaacccaagctgatggttaacaacattaagggtaatcctttaataaatgtcattctcttttccttaattaatgacaaggtaaaatcaggcgtttggtcgtgtcttccagacgttctggcagatgaataatgcagctttgctcaccccagaccacggtaaacagttgattttcagcgacaccgcttaaccaggcatgtccttcctcgccaaccatacccacgctaatgccgctgtcatcctggcggatatccgcaccgaggggagggaactgaccgctggcgttgcgtatgatgacgttaacgtctttaccggaacgggaagccagacttttgtaacctatcgcgccttcaatccatgtttccttgatgacgttttctgcaactgttacgccgtcgggtaagtcattcatgttcaccgccacggtggaaggctggtaactggaaatcaacggcaccaccgcaatgccaaaatggttggtgtagtcgagattgccctgaaccggaatatctgccacgccatcggtgctgaccatcaggcgtggttcattggtggagctgcggcgatgaaatgctgcaccatattgggttgcggtgaaagaaccgctccagctgctgctgacggaactgtaatcactggcggcataggtaccagaaatatcccactcacccgcactactcaggtgctgatagttaccgctcacctgggctccattgtccggacgatcggattgcagtccggcagacatgccccagctattacgttcatccagcgtatcgttccagctcatgcggtgtatggtgctgtggctactgttttgcatgtcatagccaacccgaccaccgttaccgaaggggaggctaatgctcagataaatctggttgtcgcgatctttatcttcgtagtgggtcgtattgaaactcgtgctaatgctgatatctctccagtcaccaatatcaacattaaaacctgctgtgatgttggcggtcgtggaggcgtctgcattccaccaggtttgatgtagcaggttggcgtaaagattgaggtttagtggggtaatcggttggcccacggataagctgatcgtctgtttttcgtcctgcgcatcgctgtcgttgtatttgtgatccagatagttggcgtagctgtgaaaatgacgatcactgaagcgataagcggcgaggctaatcgtgctgttggtggcatccacttgtttgctgtaattaaaacggtagcttaagccccgctcgtcctgctgagtatcaaaatggctactggcccaggtgacatcaaaggacagtgcgccaagccacagcatattttgcccgatacccattgcggcagaatggtagtcatcatcagaaatcagcaggccgccgtacaggctggtgttactgagcatcccccaggaaacttcattgctaaaaaaggtttcattttcagtttgatgactcatggaaggccgtggctgacccgcggccaatttatagcgaacctgtccctggcgagtcaggaagggcgtgcttgctgcgctaacctggaaattgttcacccgaccatcttcttccgtcactttgacatccagcgtgccctgaacagactgattgaggtcatcaataataaacgggcctggcgggacttttttctggtaaatgacgcggccactttgactgatcgtcaccgtggcattggtctgtgcaataccgctaatttgtggggcgtagccacgcagctcccacggtaacattcgatcgtcactcgccagtgccgcgccggtataagaaaaaccatcgaaaatattggaactgaaatcggtttcgccgagggttaacttagagcctaattgcggtaatggacgaaaaagataggtgcggcttattccgccactctggtcatggttatcttcgctatcggtcttattaagctggtaatcactgcgtaagcgccatgccccggcgttaattccggcggtaccgtaggcattcaggttagtgctgctgctgccgtcctgtgggcggtagctgctggcaaacaagttgtaatccatcaggacaccggcaacaccttctttccatgtagaggggggagcccagttttcactgtgccacgccagccaggcttgcggaatactaatattcagttgctgattggcttgatcgaaattgaagagcatttcaggtcgggaactgaaatcaatacaccgatctatctgtggcaaggactgacggacatctggttttaaaccaaatttatcgaccagactatcattgatgcatggaatggttttgtcaccctttttttgccagttaattttttgcccattactgattttgttgttattcaccgcaacgctaacaaaatattcaccgggagcaatgactcctttttcctttaataaactaatatcaatgcggtcgcgcatacttttatcgagaacattcagattgaattcgaccgccattgcgcaaggcatcgccatgaccaggcaggatacaaaagagagtcgataaatattcacggtgtccatacctgataaatattttatgaaaggcggcgatgatgccgccaaaataatacttatttataatccagcacgtaggttgcgttagcggttacttcacctgccgtgacatcgactgcattatcaatttgttccatccaggcgaaaaagttcagcgtctgttcactactgcttgcatccaggtcaagatctggcgcggcactacctaatacgatgttaccgtcatttttgtccatcagtcgtacaccgaccccagttgcttcgcctgcactggtgttgctcaacaaaggcgtagcaccagttgtcttagccgtgctatcgaaggttacgccaactttggataccggcattccgctaccgttgtcagaagcaggcagatcacagttgatcaagcgaatgtcgacggccactttattgctatgatgctcccggtttatatgggttgtcgtgacttgtccaagatctatgtttttatcaatatcttctggatgaatttcacaaggtgcttcaataacctcccccttaaagtgaatttcgccagaaccttcatcagcagcataaacaggtgcagtgaacagcagagatacggccagtgcggccaatgttttttgtcctttaaacataacagagtcctttaaggatatagaataggggtatagctacgccagaatatcgtatttgattattgctagtttttagttttgcttaaaaatattgttagttttattaaatgcaaaactaaattattggtatcatgaatttgttgtatgatgaataaaatataggggggtatagatagacgtcattttcatagggttataaatgcgactaccatgaagtttttaattgaaagtattgggttgctgataatttgagctgttctattctttttaaatatctatataggtctgttaatggattttatttttacaattttttgtgtttaggcatataaaaatcaacccgccatatgaacggcgggttaaaatatttacaacttagcaatcaaccattaacgcttgatatcgcttttaaagtcgcgtttttcatatcctgtatacagctgacgcggacgggcaatcttcataccgtcactgtgcatttcgctccagtgggcgatccagccaacggtacgtgccattgcgaaaatgacggtgaacatggaagacggaatacccatcgctttcaggatgataccagagtagaaatcgacgttcgggtacagtttcttctcgataaagtacgggtcgttcagcgcgatgttttccagctccatagccacttccagcaggtcatccttcgtgcccagctctttcagcacttcatggcaggtttcacgcattacggtggcgcgcgggtcgtaatttttgtacacgcggtgaccgaagcccatcaggcggaaagaatcatttttgtctttcgcacgacgaacaaattccggaatgtgtttaacggagctgatttcttccagcattttcagcgccgcttcgttagcaccgccgtgcgcaggtccccacagactagcaatacctgctgcgatacaggcaaacgggttcgcaccgctagagccagcggtacgcacggtggaggtagaggcgttctgttcatggtcagcgtgcaggatcagaatacggtccatagcacgttccagaatcggattaacttcatacggttcgcacggcgtggagaacatcatattcaggaagttaccggcgtaggagagatcgttgcgcgggtaaacaaatggctgaccaatggaatacttgtaacacatcgcggccatggtcggcattttgctcagcaggcggaacgcggcaatttcacggtgacgaggattgttaacatccaggctgtcgtgatagaacgccgccagcgcgccggtaataccacacatgactgccattggatggctgtcgcgacggaaagcatggaacagacgggtaatctgctcgtggatcatggtatgacgggtcaccgtagttttaaattcgtcatactgttcctgagtcggtttttcaccattcagcaggatgtaacaaacttccaggtagttagaatcggtcgccagctgatcgatcgggaaaccgcggtgcagcaaaataccttcatcaccatcaataaaagtaattttagattcgcaggatgcggtactagtgaagcctgggtcaaaggtgaacacacctttactaccgagagtacggatatcaataacatcttgacccagcgtgcctttcagcacatccagttcaacagctgtatccccgttgagggtgagttttgcttttgtatcagccatttaaggtctccttagcgccttattgcgtaagactgccggaacttaaatttgccttcgcacatcaacctggctttacccgttttttatttggctcgccgctctgtgaaagaggggaaaacctgggtacagagctctgggcgcttgcaggtaaaggatccattgatgacgaataaatggcgaatcaagtacttagcaatccgaattattaaacttgtctaccactaataactgtcccgaatgaattggtcaatacttccacactgttacataagttaatcttaggtgaaataccgacttcataacttttacgcattatatgcttttcctggtaatgtttgtaacaactttgttgaatgattgtcaaattagatgattaaaaattaaataaatgttgttatcgtgacctggatcactgttcaggataaaacccgacaaactatatgtaggttaattgtaatgattttgtgaacagcctatactgccgccaggtctccggaacaccctgcaatcccgagccacccagcgttgtaacgtgtcgttttcgcatctggaagcagtgttttgcatgacgcgcagttatagaaaggacgctgtctgacccgcaagcagaccggaggaaggaaatcccgacgtctccaggtaacagaaagttaacctctgtgcccgtagtccccagggaataataagaacagcatgtgggcgttattcatgataagaaatgtgaaaaaacaaagacctgttaatctggacctacagaccatccggttccccatcacggcgatagcgtccattctccatcgcgtttccggtgtgatcacctttgttgcagtgggcatcctgctgtggcttctgggtaccagcctctcttcccctgaaggtttcgagcaagcttccgcgattatgggcagcttcttcgtcaaatttatcatgtggggcatccttaccgctctggcgtatcacgtcgtcgtaggtattcgccacatgatgatggattttggctatctggaagaaacattcgaagcgggtaaacgctccgccaaaatctcctttgttattactgtcgtgcttagtcttctcgcaggagtcctcgtatggtaagcaacgcctccgcattaggacgcaatggcgtacatgatttcatcctcgttcgcgctaccgctatcgtcctgacgctctacatcatttatatggtcggttttttcgctaccagtggcgagctgacatatgaagtctggatcggtttcttcgcctctgcgttcaccaaagtgttcaccctgctggcgctgttttctatcttgatccatgcctggatcggcatgtggcaggtgttgaccgactacgttaaaccgctggctttgcgcctgatgctgcaactggtgattgtcgttgcactggtggtttacgtgatttatggattcgttgtggtgtggggtgtgtgatgaaattgccagtcagagaatttgatgcagttgtgattggtgccggtggcgcaggtatgcgcgcggcgctgcaaatttcccagagcggccagacctgtgcgctgctctctaaagtcttcccgacccgttcccataccgtttctgcgcaaggcggcattaccgttgcgctgggtaatacccatgaagataactgggaatggcatatgtacgacaccgtgaaagggagcgactatatcggtgaccaggacgcgattgaatatatgtgtaaaaccgggccggaagcgattctggaactcgaacacatgggcctgccgttcagccgtctcgatgatggtcgtatctatcaacgtccgtttggcggtcagagcaaaaacttcggcggcgagcaggcggcacgcactgcggcagcagctgaccgtaccggtcacgcactgttgcacacgctttatcagcagaacctgaaaaaccacaccaccattttctccgagtggtatgcgctggatctggtgaaaaaccaggatggcgcggtggtgggttgtaccgcactgtgcatcgaaaccggtgaagtggtttatttcaaagcccgcgctaccgtgctggcgactggcggagcagggcgtatttatcagtccaccaccaacgcccacattaacaccggcgacggtgtcggcatggctatccgtgccggcgtaccggtgcaggatatggaaatgtggcagttccacccgaccggcattgccggtgcgggcgtactggtcaccgaaggttgccgtggtgaaggcggttatctgctgaacaaacatggcgaacgttttatggagcgttatgcgccgaacgccaaagacctggcgggccgtgacgtggttgcgcgttccatcatgatcgaaatccgtgaaggtcgcggctgtgatggtccgtgggggccacacgcgaaactgaaactcgatcacctgggtaaagaagttctcgaatcccgtctgccgggtatcctggagctttcccgtaccttcgctcacgtcgatccggtgaaagagccgattccggttatcccaacctgtcactacatgatgggcggtattccgaccaaagttaccggtcaggcactgactgtgaatgagaaaggcgaagatgtggttgttccgggactgtttgccgttggtgaaatcgcttgtgtaagcgtacacggcgctaaccgtctgggcggcaacagcctgctggacctggtggtctttggtcgcgcggcaggtctgcatctgcaagagtctatcgccgagcagggcgcactgcgcgatgccagcgagtctgatgttgaagcgtctctggatcgcctgaaccgctggaacaataatcgtaacggtgaagatccggtggcgatccgtaaagcgctgcaagaatgtatgcagcataacttcagcgtcttccgtgaaggtgatgcgatggcgaaagggcttgagcagttgaaagtgatccgcgagcgtctgaaaaatgcccgtctggatgacacttccagcgagttcaacacccagcgcgttgagtgcctggaactggataacctgatggaaacggcgtatgcaacggctgtttctgccaacttccgtaccgaaagccgtggcgcgcatagccgcttcgacttcccggatcgtgatgatgaaaactggctgtgccactccctgtatctgccagagagcgaatccatgacgcgccgaagcgtcaacatggaaccgaaactgcgcccggcattcccgccgaagattcgtacttactaatgcggagacaggaaaatgagactcgagtttagtatttatcgctataacccggatgttgatgatgctccgcgtatgcaggattacaccctggaagcggatgaaggtcgcgacatgatgctgctggatgcgcttatccagctaaaagagaaagatcccagcctgagcttccgccgctcctgccgtgaaggtgtgtgcggttccgacggtctgaacatgaacggcaagaatggtctggcctgtattaccccgattagcgcactcaaccagccgggcaagaagattgtgattcgcccgctgccaggtttaccggtgatccgcgatttggtggtagacatgggacaattctatgcgcaatatgagaaaattaagccttacctgttgaataatggacaaaatccgccagctcgcgagcatttacagatgccagagcagcgcgaaaaactcgacgggctgtatgaatgtattctctgcgcatgttgtagtacctcttgtccgtctttctggtggaatcccgataagtttatcggcccggcaggcttgttagcggcatatcgtttcctgattgatagccgtgataccgagactgacagccgcctcgacggtttgagtgatgcattcagcgtattccgctgtcacagcatcatgaactgcgtcagtgtatgtccgaaggggctgaacccgacgcgcgccatcggccatatcaagagcatgttgttgcaacgtaatgcgtaaaccgtaggcctgataagacgcgcaagcgtcgcatcaggcaaccagtgccggatgcggcgtgaacgccttatccggcctacaagtcattacccgtaggcctgataagcgcagcgcatcaggcgtaacaaagaaatgcaggaaatctttaaaaactgcccctgacactaagacagtttttaaaggttccttcgcgagccactacgtagacaagagctcgcaagtgaaccccggcacgcacatcactgtgcgtggtagtatccacggcgaagtaagcataaaaaagatgcttaagggatcacgatgcagaacagcgctttgaaagcctggttggactcttcttacctctctggcgcaaaccagagctggatagaacagctctatgaagacttcttaaccgatcctgacagcgttgacgctaactggcgtaacacgttccagcagttacctggtacgggagtcaaaccggatcaattccactctcaaacgcgtgaatatttccgccgcctggcgaaagacgctagtcgttactctagtacgatctccgaccctgacaccaatgtgaagcaggttaaagtcctgcagctcattaacgcataccgcttccgtggtcaccagcatgcgaatctcgatccgctgggactgtggcagcaagataaagtggccgatctggatccgtctttccacgatctgaccgaagcagacttccaggagaccttcaacgtcggtagttttgccagcggcaaagaaaccatgaaactcggcgagctgctggaagccctcaagcaaacctactgcggcccgattggtgccgagtatatgcacattaccagcaccgaagaaaaacgctggatccaacagcgtatcgagtctggtcgcgcgactttcaatagcgaagagaaaaaacgcttcttaagcgaactgaccgccgctgaaggtcttgaacgttacctcggcgcaaaattccctggcgcaaaacgcttcagcctggaaggcggtgacgcgttaatcccgatgcttaaagagatgatccgccacgctggcaacagcggcacccgcgaagtggttctcgggatggcgcaccgtggtcgtctgaacgtgctggtgaacgtgctgggtaaaaaaccgcaagacttgttcgacgagttcgccggtaaacataaagaacacctcggcacgggtgacgtgaaataccacatgggcttcagctctgacttccagaccgatggcggcctggtgcacctggcgctggcgtttaacccgtctcaccttgagattgtaagcccggtagttatcggttctgttcgtgcccgtctggacagacttgatgagccgagcagcaacaaagtgctgccaatcaccatccacggtgacgccgcagtgaccgggcagggcgtggttcaggaaaccctgaacatgagcaaagcgcgtggttatgaagttggcggtacggtacgtatcgttatcaacaaccaggttggtttcaccacctctaatccgctggatgcccgttctacgccgtactgtactgatatcggtaagatggttcaggccccgattttccacgttaacgcggacgatccggaagccgttgcctttgtgacccgtctggcgctcgatttccgtaacacctttaaacgtgatgtcttcatcgacctggtgtgctaccgccgtcacggccacaacgaagccgacgagccgagcgcaacccagccgctgatgtatcagaaaatcaaaaaacatccgacaccgcgcaaaatctacgctgacaagctggagcaggaaaaagtggcgacgctggaagatgccaccgagatggttaacctgtaccgcgatgcgctggatgctggcgattgcgtagtggcagagtggcgtccgatgaacatgcactctttcacctggagcccgtacctcaaccacgaatgggacgaagagtacccgaacaaagttgagatgaagcgcctgcaggagctggcgaaacgcatcagcacggtgccggaagcagttgaaatgcagtctcgcgttgccaagatttatggcgatcgccaggcgatggctgccggtgagaaactgttcgactggggcggtgcggaaaacctcgcttacgccacgctggttgatgaaggcattccggttcgcctgagcggtgaagactccggtcgcggtaccttcttccaccgccacgcggtgatccacaaccagtctaacggttccacttacacgccgctgcaacatatccataacgggcagggcgcgttccgtgtctgggactccgtactgtctgaagaagcagtgctggcgtttgaatatggttatgccaccgcagaaccacgcactctgaccatctgggaagcgcagttcggtgacttcgccaacggtgcgcaggtggttatcgaccagttcatctcctctggcgaacagaaatggggccggatgtgtggtctggtgatgttgctgccgcacggttacgaagggcaggggccggagcactcctccgcgcgtctggaacgttatctgcaactttgtgctgagcaaaacatgcaggtttgcgtaccgtctaccccggcacaggtttaccacatgctgcgtcgtcaggcgctgcgcgggatgcgtcgtccgctggtcgtgatgagcccgaaatccctgctgcgtcatccgctggcggtttccagcctcgaagaactggcgaacggcaccttcctgccagccatcggtgaaatcgacgagcttgatccgaagggcgtgaagcgcgtagtgatgtgttctggtaaggtttattacgacctgctggaacagcgtcgtaagaacaatcaacacgatgtcgccattgtgcgtatcgagcaactctacccgttcccgcataaagcgatgcaggaagtgttgcagcagtttgctcacgtcaaggattttgtctggtgccaggaagagccgctcaaccagggcgcatggtactgcagccagcatcatttccgtgaagtgattccgtttggggcttctctgcgttatgcaggccgcccggcctccgcctctccggcggtagggtatatgtccgttcaccagaaacagcaacaagatctggttaatgacgcgctgaacgtcgaataaataaaggatacacaatgagtagcgtagatattctggtccctgacctgcctgaatccgtagccgatgccaccgtcgcaacctggcataaaaaacccggcgacgcagtcgtacgtgatgaagtgctggtagaaatcgaaactgacaaagtggtactggaagtaccggcaagtgcagacggcattctggatgcggttctggaagatgaaggtacaacggtaacgtctcgtcagatccttggtcgcctgcgtgaaggcaacagcgccggtaaagaaaccagcgccaaatctgaagagaaagcgtccactccggcgcaacgccagcaggcgtctctggaagagcaaaacaacgatgcgttaagcccggcgatccgtcgcctgctggctgaacacaatctcgacgccagcgccattaaaggcaccggtgtgggtggtcgtctgactcgtgaagatgtggaaaaacatctggcgaaagccccggcgaaagagtctgctccggcagcggctgctccggcggcgcaaccggctctggctgcacgtagtgaaaaacgtgtcccgatgactcgcctgcgtaagcgtgtggcagagcgtctgctggaagcgaaaaactccaccgccatgctgaccacgttcaacgaagtcaacatgaagccgattatggatctgcgtaagcagtacggtgaagcgtttgaaaaacgccacggcatccgtctgggctttatgtccttctacgtgaaagcggtggttgaagccctgaaacgttacccggaagtgaacgcttctatcgacggcgatgacgtggtttaccacaactatttcgacgtcagcatggcggtttctacgccgcgcggcctggtgacgccggttctgcgtgatgtcgataccctcggcatggcagacatcgagaagaaaatcaaagagctggcagtcaaaggccgtgacggcaagctgaccgttgaagatctgaccggtggtaacttcaccatcaccaacggtggtgtgttcggttccctgatgtctacgccgatcatcaacccgccgcagagcgcaattctgggtatgcacgctatcaaagatcgtccgatggcggtgaatggtcaggttgagatcctgccgatgatgtacctggcgctgtcctacgatcaccgtctgatcgatggtcgcgaatccgtgggcttcctggtaacgatcaaagagttgctggaagatccgacgcgtctgctgctggacgtgtaatagtttaagtttcacctgcactgtagaccggataaggcattatcgccttctccggcaattgaagcctgatgcgacgctgacgcgtcttatcaggcctacgggaccaccaatgtaggtcggataaggcgcaagcgccgcatccgacaagcgatgcctgatgtgacgtttaacgtgtcttatcaggcctacgggtgaccgacaatgcccggaagcgatacgaaatattcggtctacggtttaaaagataacgattactgaaggatggacagaacacatgaacttacatgaatatcaggcaaaacaactttttgcccgctatggcttaccagcaccggtgggttatgcctgtactactccgcgcgaagcagaagaagccgctagtaaaatcggtgccggtccgtgggtagtgaaatgtcaggttcacgctggtggccgcggtaaagcgggcggtgtgaaagttgtaaacagcaaagaagacatccgtgcttttgcagaaaactggctgggcaagcgtctggtaacgtatcaaacagatgccaatggccaaccggttaaccagattctggttgaagcagcgaccgatatcgctaaagagctgtatctcggtgccgttgttgaccgtagttcccgtcgtgtggtctttatggcctccaccgaaggcggcgtggaaatcgaaaaagtggcggaagaaactccgcacctgatccataaagttgcgcttgatccgctgactggcccgatgccgtatcagggacgcgagctggcgttcaaactgggtctggaaggtaaactggttcagcagttcaccaaaatcttcatgggcctggcgaccattttcctggagcgcgacctggcgttgatcgaaatcaacccgctggtcatcaccaaacagggcgatctgatttgcctcgacggcaaactgggcgctgacggcaacgcactgttccgccagcctgatctgcgcgaaatgcgtgaccagagccaggaagatccgcgtgaagcacaggctgcacagtgggaactgaactacgttgcgctggacggtaacatcggttgtatggttaacggcgcaggtctggcgatgggtacgatggacatcgttaaactgcacggcggcgaaccggctaacttccttgacgttggcggcggcgcaaccaaagaacgtgtaaccgaagcgttcaaaatcatcctctctgacgacaaagtgaaagccgttctggttaacatcttcggcggtatcgttcgttgcgacctgatcgctgacggtatcatcggcgcggtagcagaagtgggtgttaacgtaccggtcgtggtacgtctggaaggtaacaacgccgaactcggcgcgaagaaactggctgacagcggcctgaatattattgcagcaaaaggtctgacggatgcagctcagcaggttgttgccgcagtggaggggaaataatgtccattttaatcgataaaaacaccaaggttatctgccagggctttaccggtagccaggggactttccacagtgaacaggccattgcatacggcactaaaatggttggcggcgtaaccccaggtaaaggcggcaccacccacctcggcctgccggtgttcaacaccgtgcgtgaagccgttgctgccactggcgctaccgcttctgttatctacgtaccagcaccgttctgcaaagactccattctggaagccatcgacgcaggcatcaaactgattatcaccatcactgaaggcatcccgacgctggatatgctgaccgtgaaagtgaagctggatgaagcaggcgttcgtatgatcggcccgaactgcccaggcgttatcactccgggtgaatgcaaaatcggtatccagcctggtcacattcacaaaccgggtaaagtgggtatcgtttcccgttccggtacactgacctatgaagcggttaaacagaccacggattacggtttcggtcagagcacctgtgtcggtatcggcggtgacccgatcccgggctctaactttatcgacattctcgaaatgttcgaaaaagatccgcagaccgaagcgatcgtgatgatcggtgagatcggcggtagcgctgaagaagaagcagctgcgtacatcaaagagcacgttaccaagccagttgtgggttacatcgctggtgtgactgcgccgaaaggcaaacgtatgggccacgcgggtgccatcattgccggtgggaaagggactgcggatgagaaattcgctgctctggaagccgcaggcgtgaaaaccgttcgcagcctggcggatatcggtgaagcactgaaaactgttctgaaataaatatctgtaataagaaatagccctcgccgcttccctctacaggaatggcgaagggctgtcggtttcgacatggttggccatcgtatgatggccttttttgtgcttatcggctactttttcgctgcgctatcagggtaaatttatagtcatcggtattaaaagcgttgcggctatattcaaacacccgaccatcaactaaatatccacggcttactttttcaagaatcggctttgtctggctgatattaagcagacggctcatctcttcggttggcatcagaggaatgatttcctgttcgctacgatcgataaccattttcttcacttcttcgataaagtgatatttgctattttccatgacctgccaggtgagatccgggaacaacgcaagcggcatccaggtttcttccagcgccattggcttttgcttgcgatagcgcacgcgcttcacatgccacacacgatcctgcggggtgatttgtagctgttgctgaagaaaatcgtcagccggaatcacttcgaatatcagaacttcactgtgtgtatcgacgtgacggtcgctcagtttttcatcaaaactggttaactgaaaaatatcgtaattgacccgctcttctttgacgtaagtcccgctgccctgaatgctttcgaggatctgctgctcgactagctggcgcaaagcctgacgcaccgtaacccggctgacgccaaactctgtttgtagcgcactttcagtgggtaacgcatcgccaggtttaagctcgccacgcgcaatttgttcacgaatgcgatcggcaatctgccggtataagggcttgtgtcccatttttagtatctcattaatacgaatttaaccattatgcccgataaattcatcctgtaaataatacaaatacaatacaaataatttcaatcaagtgaaattgatcacataatggtattgttttatcgggcacactggcgcgactataaaaacgatcaagtgaggatcatgatgaatctgacgactctgacccaccgcgatgcgttgtgtctgaatgcgcgctttaccagccgtgaagaggccatccacgcgttgactcaacgtcttgctgctctggggaaaatttccagtactgagcaatttctggaagaagtgtatcgccgtgaaagccttggcccgaccgccttaggtgaagggttggctgtgccgcatggcaaaactgctgcggtaaaagaagcggcgtttgcggtcgccacactcagcgagccgcttcagtgggaaggcgttgatggcccggaagcagttgatttagtggtgctgctggcgattccccccaatgaagcgggtactacgcatatgcaactgctgacagcgctgaccacgcgccttgcggatgatgagattcgggcgcgtatacagagcgcgacgacgcctgatgagttgctcagcgcgctggatgacaagggaggcacgcaaccttctgcctctttttccaacgcgccaactatcgtctgcgtaacggcctgtccggcgggtattgctcacacctatatggctgcggaatatctggaaaaagccggacgcaaactcggcgtaaatgtttacgttgaaaaacaaggcgctaacggcattgaagggcgtttaacggcggatcaactcaatagtgcaaccgcctgtatttttgcggctgaagtcgccatcaaggagagtgagcgttttaatggcattcccgcgcttagtgtgcctgttgccgagccgattcgccatgcagaagcgttgatccaacaagcgcttaccctcaagcgtagcgatgagacgcgtaccgtacagcaagatacgcaaccggtgaaaagtgtcaaaacggagctgaaacaggcactgttgagcggaatctcttttgccgtaccgttgattgtcgcggggggcacggtgctggcggtcgcggtattactgagccaaatcttcgggctacaagatctgtttaatgaagaaaactcctggctgtggatgtaccgcaagctgggcggcgggctgctcggaattttgatggtaccggtgctcgcggcctataccgcctattctctggcagataaaccggcgttagcgccaggctttgcggctggacttgccgccaacatgatcggctccgggtttctcggcgcggtcgttggcggattgatagccggttacttgatgcgctgggtgaaaaatcacttgcgtcttagcagtaaattcaatggattcctgactttttatctctacccggtgctcggtacgttgggagcgggcagtctgatgctgtttgtggtgggggaacctgtcgcctggatcaataacagccttaccgcctggctgaacggtctgagtggaagtaacgcgctgttgctgggtgccattctcggttttatgtgttcctttgaccttggagggccagtgaataaagccgcttatgcattctgcctgggcgcaatggcgaacggcgtttacggcccgtatgccattttcgcctccgtcaaaatggttagcgcatttaccgtaaccgcttccacgatgctcgcaccgcgcctgtttaaagagtttgaaattgagaccgggaaatccacctggctgttagggctggcaggtattaccgaaggggcgatcccgatggcgattgaagatccgctgcgggttattggtagctttgtgctgggctctatggtaacgggcgctattgtcggtgcgatgaatatcggccttagcacacccggtgccggcattttcagcctctttttacttcatgataatggcgcgggcggtgttatggcggcaattggctggtttggcgcggcattggtgggggctgcaatcagcactgcaattctcctgatgtggcggcgtcacgcggttaagcatggcaactatctgactgatggcgtaatgccataaacaaaaaggaaacgacgatgaaagcagtatctcgcgttcacatcaccccgcatatgcactgggatcgagagtggtatttcaccaccgaagagagtcgtattctgctggtcaataatatggaagagatcctgtgccgactggaacaggacaacgaatacaaatattacgtactcgacgggcaaacggcgatcctcgaagattatttcgcggtgaaaccggaaaacaaagaccgtgtgaagaaacaggtagaagccggcaagttgattatcggcccctggtatacccagaccgataccacgattgtttctgcggaatccatcgtccgtaatctgatgtacggaatgcgtgactgcctcgcgtttggcgagccgatgaaaataggttatttaccagattcctttggcatgtccgggcaactgccgcatatctacaatggatttggcattacccgcaccatgttctggcgcggatgtagcgagcgccacggtactgataaaaccgagtttttgtggcaaagcagtgacggtagcgaagtgacggcgcaggtgctgccgctgggctacgccatcggtaagtacttacctgccgacgaaaacggattacgtaaacgcctcgacagttattttgacgtgctggaaaaagcgtctgtaaccaaagagattttgctgccgaatgggcatgaccagatgccattgcagcaaaatatcttcgaagtgatggataagctacgtgagatctaccctcaacgtaagtttgtgatgagccgctttgaagaggtatttgagaagatcgaagcgcagcgagataatctggcaaccctgaaaggggaatttattgatggcaaatatatgcgcgtgcatcgcaccatcggttctacgcgtatggatatcaaaattgcccacgcgcgtattgaaaataagattgttaatctgctggaaccgctggcaacactggcctggacgttgggttttgaataccaccacggcttgctggagaaaatgtggaaagagatcttaaaaaatcatgcccacgacagtatcggctgctgctgtagtgacaaagttcatcgcgaaatcgtcgcccgcttcgaactggctgaagacatggcggataatctgattcgtttctacatgcgcaaaattgccgacaacatgccgcagagcgacgccgacaaactcgtcctgtttaacctgatgccctggccgcgtgaagaagttatcaacaccactgtgcggctgcgcgccagccagtttaatttgcgggacgatcgcggtcagcctgtaccgtattttattcgccatgcccgtgagatcgatccaggcctaatcgatcggcaaatagttcattacggtaattacgatccctttatggagtttgatatacagatcaaccagattgtcccttctatgggctatcgcacgctttatatcgaagcgaatcagcctggcaacgtaattgcggcaaaaagtgacgctgaagggatactggaaaatgctttctggcaaattgcgctcaatgaggatggttctctgcaactggtagataaagacagcggtgtgcgctatgaccgggtattgcaaattgaagaaagctctgatgatggtgatgaatatgactatagtcccgcaaaagaagagtgggtaattaccgcagcgaacgcgaaaccgcaatgcgatattattcatgaagcctggcagagcagggctgttatccgctatgacatggcagtgccgctcaatttgagtgaacgcagcgcccggcaatccactggcagagtaggggtggtgttggttgtcactcttagtcataacagcaggcgtattgatgtggatatcaatcttgataaccaggctgacgatcatcgccttcgtgtcctggtccctacaccttttaacaccgacagtgttctggcagatacgcagtttggtagcctaacgcgccccgtgaacgacagtgcaatgaacaactggcagcaagaaggctggaaagaagcgccggttccggtatggaatatgctcaactatgttgccttacaggaagggcgtaacggcatggctgtctttagcgaagggttacgtgaatttgaagtcatcggtgaagagaagaaaacctttgccattacgttgctgcgtggcgtgggcttactgggcaaagaagatctgcttttaaggcctgggcggcctagcggaattaaaatgccagtcccggacagtcaactacgtggtctgctttcttgtcgcctaagtttattgagttataccggtacgccaaccgccgctggtgtagctcagcaggcgcgagcatggctgactccagtacagtgttacaacaaaatcccatgggatgtgatgaagctcaacaaagccggattcaacgtgccggaaagttatagtttgttgaaaatgcccccagtgggatgcctgataagcgcacttaagaaagctgaagaccgacaagaagtgattttacggctgtttaatccggctgaaagtgcaacctgtgatgcgactgttgctttcagtcgcgaggtgatttcttgcagtgaaacgatgatggatgaacacattaccaccgaggaaaatcaaggtagtaatctaagcgggccttttttacccggccagagtcggacgttcagttaccggcttgcctgaatagcaatcaaaccgaagccacatatgcgcggccagattgttgacaaagggcgctttgttcatgccggatacggcatgaacgctttattcggtctacaaaagcaggcaaattcaatatattgcagagatgatgtagacactggcaagcgtagcgcatcaggtaattttgcgtttatcttcactctcaagccacgtatatgtggctttatttttaacaaaataataaccctgggtgagttaattataatataattataagttaactaaatgttaatattggcggggtggatttatgcctttattagtaatcctgaaactctgcgtcgtattagccagtgaccaaaaaaagaattaaggtcaaccgtgctgtttttgcttcgtctctttttatctttaattgccaaccgaaactaatttcagccttataactcacacattttaaacataaatgtcactaaagttaccttattgaaacatgattaacataatttgtaggaattgatatttatcaatgtataagtcttggaaatgggcatcaaaaagagataaattgttctcgatcaaattggctgaaaggcggtaatttagctataaattgatcaccgtcgaaaaatgcaaatttgcttcaacaaaaacctgtttattgtaaggattttgcggcgtaatatatacgtgggatcaatttgagtttttattaacatgtttgcaacctttctttacgccgtttttgtgtgcattcacatggtatgatgaaagtgttcaaacaaatttctattggggcatgcgtgtgaccctttctaacggggttcactctcggagtcttcatgcgatgagcaaggagtcatgatgttagatatagtcgaactgagccgcttacagtttgccttgaccgcgatgtaccacttcctttttgtgccactgacgctcggtatggcgttcctgctggccattatggaaacggtctacgtcctctccggcaaacagatttataaagatatgaccaagttctggggcaagttgtttggtatcaacttcgctctgggtgtggctaccggtctgaccatggagttccagttcgggactaactggtcttactattcccactatgtaggggatatcttcggtgcgccgctggcaatcgaaggtctgatggccttcttcctcgaatccacctttgtaggtctgttcttcttcggttgggatcgtctgggtaaagttcagcatatgtgtgtcacctggctggtggcgctcggtagtaacctgtccgcactgtggattctggttgcgaacggctggatgcaaaacccaatcgcgtccgatttcaactttgaaactatgcgtatggagatggtgagcttctccgagctggtgcttaacccggttgctcaggtgaaattcgttcacactgtagcgtctggttatgtgactggcgcgatgttcatcctcggtatcagcgcatggtatatgctgaaaggtcgtgacttcgccttcgctaaacgctcctttgctatcgctgccagcttcggtatggctgctgttctgtctgttattgttctgggtgatgaatccggctacgaaatgggcgacgtgcagaaaaccaaactggctgctattgaagccgagtgggaaacgcaacctgcgcctgctgcctttactctgttcggcattcctgatcaggaagaggagacgaacaaatttgcgattcagatcccttacgcactgggcatcattgcaacgcgttccgtggataccccggttatcggcctgaaagagctgatggtgcagcatgaagaacgcattcgtaacgggatgaaggcgtactctctgctcgaacaactgcgttctggttctaccgaccaggcggttcgtgaccagttcaatagcatgaagaaagacctcggttacggtctgctgctgaaacgctatacgccaaacgtggctgatgcgactgaagcgcagattcaacaggcaaccaaagactccatcccgcgtgtagcgccgctgtactttgcgttccgtatcatggtggcgtgtggcttcctgcttctggcaatcatcgcgctctctttctggagtgtcatccgcaaccgcattggcgagaaaaaatggcttctgcgcgccgcgctgtacggtattccgctgccgtggattgctgtagaagcgggctggttcgtggctgaatatggccgccaaccgtgggctatcggtgaagtgctgccgacagctgtggcgaacagcagtctgaccgcaggcgatctcatcttcagtatggtgctgatttgcggcctgtataccctgttcctggtggcagaattgttcttaatgttcaagtttgcacgcctcggcccaagcagcctgaaaaccggtcgctatcactttgagcagtcttccacgactactcagccggcacgctaagacaggagtcgtcaaatgatcgattatgaagtattgcgttttatctggtggctgctggttggcgttctgctgattggttttgcagtcactgacggtttcgacatgggggtgggcatgctcacccgtttcctcggtcgtaacgacaccgagcgtcgaattatgattaactccattgcaccacactgggacggtaaccaggtttggctgatcaccgcgggcggcgcactctttgctgcctggccgatggtctatgccgctgcgttctccggcttctatgtggcgatgatcctcgtgctggcgtctttgttcttccgtccggtcggttttgactaccgctccaagattgaagaaacccgctggcgtaacatgtgggactggggcatcttcattggtagcttcgttccgccgctggtaattggtgtagcgttcggtaacctgttgcagggcgtaccgttcaacgttgatgaatatctgcgtctgtactacaccggtaacttcttccagttgcttaacccgttcggcctgctggcaggcgtggtgagcgtagggatgatcattactcagggcgcaacctatctgcaaatgcgtaccgtgggcgaactgcacctgcgtacccgtgcaacggctcaggtggctgcgctggtgacactggtctgtttcgcactggctggcgtatgggtgatgtacggtatcgatggttatgtcgtgaaaagcacaatggaccattacgcagcctctaacccactgaataaagaagtggttcgtgaagctggcgcatggctggttaacttcaacaacacgccaattctgtgggctattccggcactgggtgtggttctgccgctgctgaccatcctgactgcacgtatggataaagccgcgtgggcgtttgtgttctcctccctgacgctggcctgcatcatcctgacagccggtatcgcaatgttcccgtttgtgatgccgtccagcaccatgatgaacgcaagtctgacaatgtgggatgcaacttccagccagctgacgcttaacgtcatgacctgggttgcggtggttctggtaccgatcattctgctctacaccgcctggtgttactggaaaatgttcggtcgtatcaccaaagaagatattgaacgtaacacccactctctgtactaagtaaggagctaaaaatgtggtatttcgcatggattctgggaacgcttcttgcctgtagctttggggtaatcaccgcgctggcgcttgaacacgtcgaaagtggcaaagccggtcaagaagacatctgatgagtaagattatcgcgactttgtatgcggtaatggacaagcgccccctgcgggcgctttccttcgtgatggcgcttctgttagcaggatgtatgttttgggacccatctcgttttgccgcgaagaccagtgaactggaaatctggcatggtttattgctgatgtgggccgtctgtgctggtgtgattcacggcgtgggctttcgtccgcagaaggttctttggcaagggattttttgcccattgcttgccgatattgttctcattgtcgggctgattttcttcttcttttaaatcagaattctctttaaaaaattatgggccgctccaggcccataaatttttacgctcccttaacttgccctcattcccaaacctcaatcgcgcgcgtatagtagcagcgtttaaaagctctaacttttgttgcattaccgggatgtaaagtgaatacaacgctgtttcgatggccggttcgcgtctactatgaagataccgatgccggtggtgtggtgtaccacgccagttacgtcgctttttatgaaagagcacgcacagagatgctgcgtcatcatcacttcagtcagcaggcgctgatggctgaacgcgttgcctttgtggtacgtaaaatgacggtggaatattacgcacctgcgcggctcgacgatatgctcgaaatacagactgaaataacaagtatgcgtggcacctctttggttttcacgcaacgtattgtcaacgccgagaatactttgctgaatgaagcagaggttctggttgtttgcgttgacccactcaaaatgaagcctcgtgcgcttcccaagtctattgtcgcggagtttaagcagtgactgacatgaatatccttgatttgttcctgaaggctagccttctggttaaacttatcatgttgattttgattggttttagtatcgcatcttgggccattattatccagcggacccgtattcttaacgcagcggcgcgcgaagccgaagcgtttgaagataaattctggtctggaatcgaactctctcgcctctatcaagagagccaggggaaacgggataatctgactggtagcgaacaaatcttttacagcgggttcaaagagtttgtgcgcctgcatcgtgccaatagccatgcgccggaagccgtagtggaaggggcgagccgtgctatgcgtatctccatgaaccgtgaacttgaaaatctggaaacgcacattccgttcctcggtacggttggctccatcagcccgtatattggtctgtttggtacggtctgggggatcatgcacgcctttatcgccctcggggcggtaaaacaagcaacactgcaaatggttgcgcccggtatcgcagaagcgttgattgcgactgcaattggtctgtttgccgctatcccggcagttatggcctacaaccgcctcaaccagcgcgtaaacaaactggaactgaattacgacaactttatggaagagtttaccgcgattctgcaccgccaggcgtttaccgttagcgagagcaacaaggggtaagccatggccagagcgcgtggacgaggtcgtcgcgatctcaagtccgaaatcaacattgtaccgttgctggacgtactgctggtgctgttgctgatctttatggcgacagcgcccatcatcacccagagcgtggaggtcgatctgccagacgctactgaaagtcaggcggtgagcagtaacgataatccgccagtgattgttgaagtgtctggtattggtcagtacaccgtggtggttgagaaagatcgcctggagcgtttaccaccagagcaggtggtggcggaagtgtccagccgtttcaaggccaacccgaaaacggtctttctgatcggtggcgcaaaagatgtgccttacgatgaaataattaaagcactgaacttgttacatagtgcgggtgtgaaaagcgttggtttaatgacgcagcctatctaaacatctgcgtttcccttgcttgaaagagagcgggtaacaggcgaacagtttttggaaaccgagagtgagtaaggcaaccgaacaaaacgacaagctcaagcgggcgataattattagtgcagtgctgcatgtcatcttatttgcggcgctgatctggagtagcttcgatgagaatatagaagctagtgccggaggcggcggtggtagctccatcgacgctgtcttggttgatagtggtgcggtagttgagcagtacaaacgcatgcaaagccaggaaagtagcgcgaagcgttctgatgaacagcgcaagatgaaggaacagcaggctgctgaagaactgcgtgagaaacaagcggctgaacaggaacgcctgaagcaacttgagaaagagcggttagcggctcaggagcagaaaaagcaggctgaagaagccgcaaaacaggccgagttaaagcagaagcaagctgaagaggcggcagcgaaagcggcggcagatgctaaagcgaaggccgaagcagatgctaaagctgcggaagaagcagcgaagaaagcggctgcagacgcaaagaaaaaagcagaagcagaagccgccaaagccgcagccgaagcgcagaaaaaagccgaggcagccgctgcggcactgaagaagaaagcggaagcggcagaagcagctgcagctgaagcaagaaagaaagcggcaactgaagctgctgaaaaagccaaagcagaagctgagaagaaagcggctgctgaaaaggctgcagctgataagaaagcggcagcagagaaagctgcagccgacaaaaaagcagcagaaaaagcggctgctgaaaaggcagcagctgataagaaagcagcggcagaaaaagccgccgcagacaaaaaagcggcagcggcaaaagctgcagctgaaaaagccgctgcagcaaaagcggccgcagaggcagatgatattttcggtgagctaagctctggtaagaatgcaccgaaaacggggggaggggcgaaagggaacaatgctagccctgccgggagtggtaatactaaaaacaatggcgcaagtggggccgatatcaataactatgccgggcagattaaatctgctatcgaaagtaagttctatgacgcaagctcctatgcaggcaaaacctgtacgctgcgcataaaactggcacccgatggtatgttactggatatcaaacctgaaggtggcgatcccgcactttgtcaggctgcgttggcagcagctaaacttgcgaagatcccgaaaccaccaagccaggcagtatatgaagtgttcaaaaacgcgccattggacttcaaaccgtaatcgcgatgttgactgttcggacggtcaacatcaggcaccggttgccacggggttctggtagttttgtgtattttagtttgttaacattctgctaaattatcgtgggccatcggtccagataagggagatatgatgaagcaggcattacgagtagcatttggttttctcatactgtgggcaagtgttctgcatgctgaagtccgcattgtgatcgacagcggtgtagattccggtcgtcctattggtgttgttcctttccagtgggcggggcctggtgcggcacctgaagatattggcggcatcgttgctgctgacttgcgtaacagcggtaaatttaatccgttagatcgcgctcgtctgccacagcagccgggtagtgcgcaggaagtacaaccagctgcatggtccgcactgggcattgacgctgtagttgtcggtcaggtcactccgaatccggatggttcttacaatgttgcttatcaacttgttgacactggcggcgcaccgggtactgtacttgctcagaacagctacaaagtgaacaagcagtggctgcgttatgctggtcataccgccagtgatgaagtgtttgaaaaactgaccggcattaaaggtgcgttccgtactcgtattgcctacgttgttcagaccaacggcggtcagttcccgtatgaactgcgcgtatctgactatgacggttacaaccagtttgtcgttcaccgtagtccgcagccgctgatgtctccggcgtggagtccagacggttctaaactggcttatgtgaccttcgaaagcggtcgttccgcgctggttattcagacgctggcaaatggcgctgtacgtcaggtggctagtttcccgcgtcacaacggtgcacctgcattcagcccagacggcagcaaactggcattcgccttgagcaaaaccggtagtctgaacctgtacgtaatggatttggcttctggtcagatccgccaggtgactgatggtcgcagtaacaataccgaaccgacctggttcccggatagccagaacctggcatttacttctgaccaggccggtcgtccgcaggtttataaagtgaatatcaacggcggtgcgccacaacgtattacctgggaaggtagccagaaccaggatgcggatgtcagcagcgacggtaaatttatggtaatggtcagctccaatggtgggcagcagcacattgccaaacaagatctggcaacgggaggcgtacaagttctgagctccacgttcctggatgaaacgccaagtctggcacctaacggcactatggtaatctacagctcttctcaggggatgggatccgtgctgaatttggtttctacagatgggcgtttcaaagcgcgtcttccggcaactgatggacaggtcaaattccctgcctggagcccgtatctgtgataataattaattgaatagtaaaggaatcattgaaatgcaactgaacaaagtgctgaaagggctgatgattgctctgcctgttatggcaattgcggcatgttcttccaacaagaacgccagcaatgacggcagcgaaggcatgctgggtgccggcactggtatggatgcgaacggcggcaacggcaacatgtcttccgaagagcaggctcgtctgcaaatgcaacagctgcagcagaacaacatcgtttacttcgatctggacaagtacgatatccgttctgacttcgctcaaatgctggatgcacatgcaaacttcctgcgtagcaacccgtcttacaaagtcaccgtagaaggtcacgcggacgaacgtggtactccggaatacaacatctccctgggtgaacgtcgtgcgaacgccgttaagatgtacctgcagggtaaaggcgtttctgcagaccagatctccatcgtttcttacggtaaagaaaaacctgcagtactgggtcatgacgaagcggcatactccaaaaaccgtcgtgcggtactggtttactaagagaattgcatgagcagtaacttcagacatcaactattgagtctgagcttactggttggtatagcggccccctgggccgcttttgctcaggcaccaatcagtagtgtcggcagtggcagcgtcgaagaccgcgtcactcaacttgagcgtatttctaatgctcacagccagcttttaacccaactccagcaacaactttctgataatcaatccgatattgattccctgcgtggtcagattcaggaaaatcagtatcaactgaatcaggtcgtggagcggcaaaagcagatcctgttgcagatcgacagcctcagcagcggtggtgcagcggcgcaaagtaccagcggcgatcaaagcggtgcggcggcaagtacgacgccgacagctgatgctggtactgcgaatgctggcgcgccggtgaaaagcggtaatgcaaacacggattacaatgcagctattgcgctggtgcaggataaatcccgccaggatgacgcaatggtggcatttcagaatttcatcaaaaattaccctgatagtacttacctgccaaacgccaattattggctgggtcagttaaactacaacaagggtaaaaaagatgatgcggcgtactattttgctagcgtagtgaaaaactatccgaagagtccaaaggctgcagatgcgatgtttaaagtcggcgtcatcatgcaggacaaaggtgacaccgcaaaagcgaaagccgtataccagcaggttatcagtaaataccctggtactgatggcgctaaacaggcacaaaaacgtctgaacgcgatgtaatgcataacacacgaccagaagtcgcattatttctggtcgtgtcgtgcgaatcataagcagttgagtgatctacatcgaaatttttgttgcgctcaagtctgaaatcagtaatatatgccgccgttgccacgggatatcaaacaaaccgaaagcaacgaaaaagtgggtcgttagctcagttggtagagcagttgacttttaatcaattggtcgcaggttcgaatcctgcacgacccaccaatcgctaaggtggaagcggtagtaaaacgtgaaggataacgttgcatgagcaacggcccgaagggcgagacgaagtcgagtcatcctgcacgacccaccactaacatagttagttgtagtatccagcgtagtatcgggtgattagctcagctgggagagcacctcccttacaaggagggggtcggcggttcgatcccgtcatcacccaccaccgggtcgttagctcagttggtagagcagttgacttttaatcaattggtcgcaggttcgaatcctgcacgacccaccagttttaacatcgaagacagatgttaagcgtgtaggataacgttgcgtcagcaacggcccgtagggcgagcgaagcgagtcatcctgcacgacccaccactaatgacggtgggttcggtggaagtagtttgtagtatccagcgcagtatcgggtgattagctcagctgggagagcacctcccttacaaggagggggtcggcggttcgatcccgtcatcacccaccactcgggtcgttagctcagttggtagagcagttgacttttaatcaattggtcgcaggttcgaatcctgcacgacccaccagttttaacatcaaactcagatgttaagcgtgaaggataacgttgcgccagcaacggcccgtagggcgagcgaagcgagtcatcctgcacgacccaccaatcttaaagattggccccgagtaaaaatctttcaggtaacacccgtatgggtcgttagctcagttggtagagcagttgacttttaatcaattggtcgcaggttcgaatcctgcacgacccaccaatttaaaggtggttactggtagagaacgtgaaggataacgttgcgttagcaacggcccgaagggcgagacgaagtcgagtcatcctgcacgacccaccatcctgaatgattaaggcagcataatcccgcaaggggtcgttagctcagttggtagagcagttgacttttaatcaattggtcgcaggttcgaatcctgcacgacccaccaatgtaaaaaagcgccctaaaggcgcttttttgctatctgcgatactcaaagattcgaacctgcagcaggtttgagttgagcgcagcgaaacaacggagccgctcgcggcgacggcccgaagggcgagcgaagcgagtcatcctgcacgacccaccaatgtaaaaaagcgccctaaaggcgcttttttgctattcaggcatcctcaatttcactttgtaaacctgatgacatcgtcagagcttactgtgcaagcaactctatgtcggtggaattaggcgtaaaatgacgcatcctgcacattaggcgtaattcgagtgacttttccccaccattcgactatcttgtttagcatataaaacaaattacaccgataacagcgaatattacgctaatgtcggttttaacgttaagcctgtaaaacgagatggtaagatgagcgtaatgtttgatccagacacggcgatttatcctttccccccgaagccgacgccgttaagcattgatgaaaaagcgtattaccgcgagaagataaaacgtctgctaaaagaacgtaatgcggtgatggttgcccactactataccgatcccgaaattcaacaactggcagaagaaaccggtggctgtatttctgattctctggaaatggcgcgcttcggtgcaaagcatcccgcttctactttgttagtcgctggggtgagatttatgggagaaaccgccaaaattctcagtccggaaaaaacaattctgatgccgacacttcaggctgaatgtagtctggatctcggctgccctgttgaagaatttaacgcattttgcgatgcccatcccgatcgtactgtcgtcgtctacgccaacacttctgctgcggtaaaagcgcgcgcagattgggtggtaactagtagcattgccgtcgaacttattgatcatcttgatagtttgggtgaaaaaatcatctgggcacccgacaaacatctggggcgttacgtgcaaaaacagacgggtggagacattctatgctggcagggtgcctgtattgtgcatgatgaatttaagactcaggcgttaacccgcttgcaagaagaatacccggatgctgccatactggtgcatccagaaagtccacaagctattgtcgatatggcggatgcggtcggttccaccagtcaactgatcgctgctgcgaaaacattgccacatcagaggcttattgtggcaaccgatcggggtattttctacaaaatgcagcaggcggtgccagataaagagttactggaagcaccaaccgcaggtgagggtgcaacctgccgcagctgcgcgcattgtccgtggatggccatgaatggccttcaggccatcgcagaggcattagaacaggaaggaagcaatcacgaggttcatgttgatgaaaggctgcgagagagggcgctggtgccgctcaatcgtatgctggattttgcggctacactacgtggataacgaataataaggcgtaacgttacgctttgggggaaagatggatttttttagtgtgcagaatatcctggtacatataccaataggggcaggcggttatgatctcagttggatcgaagcggtaggcacgatcgccgggttgctgtgtattggccttgccagtctggagaagatcagcaactacttctttggcctgatcaacgtcaccttgtttggcattattttctttcagattcagctgtatgccagcctgctattacaggtgtttttctttgccgcgaatatttacggttggtatgcgtggagccgacaaaccagtcagaacgaggcggagttgaaaattcgctggttgccattgccgaaggcactcagctggttggcggtttgcgttgttagcattggtctgatgacggtatttatcaatccggtgtttgcatttttgacccgcgtggcagtcatgatcatgcaagcattaggattacaggttgtgatgcctgaactgcaaccggacgctttcccgttctgggatagttgcatgatggtgttatctatcgtggcaatgattctgatgacgcgtaagtatgtggaaaactggctgttgtgggtgattattaacgtgattagcgtcgttatttttgcacttcagggcgtttacgccatgtctctggagtacatcatcctgacctttattgcgctcaacggcagccggatgtggatcaacagcgcacgtgaaagaggcagtcgcgcgctgtcccattaatggtgatgatgactatggccagacaccccttcattcaggtggcagtctggcccatgacaaggttgatattccatctgaatggtggcgtgctcaatctgatagtgatccatcaggtagtgttggatctgatccaacaaggcatcgtgatcgtgtggcgggatcacctgcacatgcaacgtcatcaccggcttctcgcctaccatccatacatgtacatggtgcacattgcggacttccgggatttcccggcacatacgacgcttcagttcagcgatatccaggcttaccggtgcaccttcaagtaattcattcacgctatctttcaacagtcgccacgcgctacgcagaaccagaaggctcaccagtatgctgagaatggggtcagcaggtgtccagccagtccagataataatcaacgcggcaataatagccccaacgctacccagcaggtccccgagcacatgcagtgccgctgctcgtacgttgaggtttttctcttcgctgccgtgatgaagtaaccagaaagaaagtatatttgccagcaacccagccacggcaattgccatcatcatgccgccctcgaccggacgcggcgtgcggaagcgttctatcgcctcccagacaatcaaaatggtaattaccacgagggctatggcattcacaaacgccgcgagcgtggtcagtcttagccaaccgaaagtgtggcgaatggtgggaggacgacgactaaattgcacggcgagtagggcgaaaagcagggcggcagtatcggtcaacatatgacccgcatcggccagcaatgccagagaaccagaaagaaaaccaccaacgacttctaccagcataaacccggcagtcacgccgaaagcatacaacaagcgacgagcattattatcttctggcaggtgactggacgtgtgactgtgactgtgcgccatgacgagtcatcccttaattattctcacttaactttatgacatcatactgcttttagaagtgaaaaattaaaagggagagactccgctctcccattattggctattttgcagggttactgcgtggtaccgtcggttttggtatcgacatcattattgatgccatcaccggtttgtacctttttattgatatccggacagcgaccatctttgcacatggtgttcttgtgctcttcatctttggtcattccgtcattgttcatactagaaccatcgctatgcagcattgtgccgccagaaccggtatttaccccgttattgtcgacgttatttggcgcgacattttcacgggcgtcaggggctacctggcccgcatcagctgcggcgtttgcctggccgttattagtttgcgctccgctatcggcagccagtgcggcaccgctggcaaggcttagagtggcagtcagaaataatgtggccagttttgtcattttcataggatgctcctgttatggtcgttatgtcggataacctcttccaacagtgcatttgcaggtgaatataaggcattggtttaagatttcagccaggttatgaaacgcagcagagaatcttgaaataattaacaaacaaaggagttacagttagaaattgtaggagagatctcgtttttcgcgacaatctggcgtttttcttgctaattccaggattaatccgttcatagtgtaaaaccccgtttacacattctgacggaagatatagattggaagtattgcattcactaagataagtatggcaacactggaacagacatgaattatcagaacgacgatttacgcatcaaagaaatcaaagagttacttcctcctgtcgcattgctggaaaaattccccgctactgaaaatgccgcgaatacggttgcccatgcccgaaaagcgatccataagatcctgaaaggtaatgatgatcgcctgttggttgtgattggcccatgcagtattcatgatcctgtcgcggcaaaagagtatgccactcgcttgctggcgctgcgtgaagagctgaaagatgagctggaaatcgtaatgcgcgtctattttgaaaagccgcgtaccacggtgggctggaaagggctgattaacgatccgcatatggataatagcttccagatcaacgacggtctgcgtatagcccgtaaattgctgcttgatattaacgacagcggtctgccagcggcaggtgagtttctcgatatgatcaccccacaatatctcgctgacctgatgagctggggcgcaattggcgcacgtaccaccgaaagccaggtgcaccgcgaactggcaagtgggctttcttgtccggtcggcttcaaaaatggcaccgacggtacgattaaagtggctatcgatgccattaatgccgccggtgcgccgcactgcttcctgtccgtaacgaaatgggggcatagcgcgattgtgaataccagcggtaacggcgattgccatatcattctgcgcggcggtaaagagcctaactacagcgcgaagcacgttgctgaagtgaaagaagggctgaacaaagcaggcctgccagcacaggtgatgatcgatttcagccatgctaacagctccaaacaattcaaaaagcagatggatgtttgtgctgacgtttgccagcagattgccggtggcgaaaaggccattattggcgtgatggtggaaagccatctggtggaaggcaatcagagcctcgagagcggggagccgctggcctacggtaagagcatcaccgatgcctgcatcggctgggaagataccgatgctctgttacgtcaactggcgaatgcagtaaaagcgcgtcgcgggtaaggtttaattgtcggatgcgccgtcagagtggcgtatccgatgaatcaccacaggcctgataagtcgcgcagcgtcgcatcaggcaatgtgctccattgttagcaacaaaaaagccgactcacttgcagtcggctttctcattttaaacgaatgacgtttacttcgctttaccctggtttgcaaccgccgctgctttcgctgcgatctcgtcagcattacccagataatagcgtttcagcggtttgaaattctcgtcgaactcatacaccagcggcacgccagtcgggatattaagctcaagaatctcttcttcgctcatgttatcaagatatttcaccagcgcacgtaaagagttaccgtgtgcagcgatgatcacgcgctcaccgctcttcatacgcggcagaatagtttcattccagtaagggatcacgcggtcaatggtcagcgccaggctttccgtcagcggcagttctttctcgctcagtttcgcgtaacgcggatcgtgacccggataacgctcatcatctttagtcagttccggcggagtcactgcaaaaccacgacgccactgtttcacctgctcgtcgccatacttttcagcagtttccgctttgttcagaccctgcaacgcaccgtagtgacgttcgttcagtttccaggatttctcaacgggcagccatgcctgatccagttcgtccagcacattccacagggtatggatagcgcgtttcagcacagaagtgtaagcaaagtcaaagctgtaaccttcctctttcagcagcttacctgctgcttttgcttcgcttacgcctttctcagacagatccacgtcgtaccaaccggtgaaacggttttctttgttccactgactttcgccatgacgaaccagaaccagcttagttacagccatatacttactcctcaaatcatcttttaatgataataattctcattatattgccgcgacgaagcaacagcaatgcttacgcataaccatagcgaaaatagtggcgcagtgtaaggttgttgtgaatattgagttgcaaatatgtcggtgtttgctggtgatttgaacaatatgagataaagccctcatgacgagggcgtaacattactcagcaataaactgatattccgtcaggctggaatactcttcgccaggacgcaggaagcagtccggttgcggccattcagggtggttcgggctgtccggtagaaactcgctttccagagccagcccttgccagtcggcgtaaggttcggttccccggctcggtgtgccgccgaggaagttgccggagtagaattgcagagccggagcggtggtgtagaccttcagctgcaatttttcatctgcactccagacatgcgccgccactttcttgccatcgcctttggcctgtaacaagaatgcgtgatcgtaacctttcactttgcgctgatcgtcgtcggcaagaaactcactggcgatgattttggcgctgcggaaatcaaaagacgttccggcgacagatttcaggccgtcgtgcggaatgccgccttcatcaaccggcagatattcgtccgccagaatctgcaacttgtgattgcgcacgtcagactgctcgccgtcaagattgaaatagacgtgattagtcatattcaccgggcaaggtttatcaactgtggcgcgataagtaatggagatacggttatcgtcggtcagacgatattgcaccgtcgcgccgagattacccgggaagccctgatcaccatcatcactactcagggcaaacagcacctgacgatcgttctggttcacaatctgccagcgacgtttgtcgaacccttccggcccgccgtgcagctggttaacgccctgacttgggctaagcgtcacggtttcaccgtcaaaggtataacggctattggcgatacggttggcataacgaccaatagaggcccccagaaacgcggcctgatcctgatagcattccgggctggcacagccgagcagcgcctcgcggacgctgccatcggaaagcggaatacgggcggaaagtaaagtcgcaccccagtccatcagcgtgactaccatccctgcgttgttacgcaaagttaacagtcggtacggctgaccatcgggtgccagtgcgggagtttcgttcagcactgtcctgctccttgacttggtttacaaacgtaaaaagtctctttaatacctgtttttgcttcatattgttcagcgacagcttgctgtacggcaggcaccagctcttccgggatcagcgcgacgatacagccgccaaatccgccgccggtcatgcgtacgccacctttgtcgccaatcacagctttgacgatttctaccagagtgtcaatttgcggcacggtgatttcgaaatcatcgcgcatagaggcatgagactccgccatcaactcgcccatacgtttcaggtcgccttgctccagcgcgctggcagcttcaacggtgcgggcgttttcagtcagtatatgacgcacgcgttttgccacgatcgggtccagttcatgcgcaacagcgttgaactcttcaatggtgacatcacgcagggctggctgctggaagaaacgcgcaccggtttcgcactgttcacgacgggtgttgtattcgctgccaaccagggtacgtttgaagttactgttgatgatgacgacagccacacctttgggcatggaaactgctttggtccccagactgcggcaatcgatcagcaaggcatgatctttcttgccgagcgcggaaattagctgatccatgatcccgcagttacagcctacaaactggttttctgcttcctgaccgttaagcgcgatttgtgcgccgtccagcggcagatgataaagctgctgcaatacggttccgaccgcgacttccagactagcggaagaacttaacccggcaccctgcggcacattgccgctgatcaccatgtccacgccgccgaagctgttgttacgcagttgcagatgtttcaccacgccacgaacgtagttagcccattgatagttttcatgtgcgacaatgggcgcatcgagggaaaactcgtcgagctgattttcataatcggctgccatcacgcgaactttacggtcatcgcgtggtgcacaactgatcacggtttgataatcaatcgcgcagggcagaacgaaaccgtcgttgtagtcggtgtgttcaccaatcaaattcacgcggccaggcgcctgaatggtgtgagtggcagggtagccaaatgcgttggcaaacagagattgtgttttttctttcagactcatttcttacactccggattcgcgaaaatggatatcgctgactgcgcgcaaacgctctgctgcctgttctgcggtcaggtctcgctgggtctctgccagcatttcataaccaaccataaatttacgtacggtggcggagcgcagcagaggcggataaaagtgcgcgtgcagctgccagtgttgattctcttcgccattaaatggcgcgccgtgccagcccatagagtaggggaaggagcactggaagaggttgtcataacgactggtcagctttttcaacgccagcgccagatcgctgcgctgggcgtcggtcaaatcggtgatccgtaaaacgtgggctttgggcagcagtagcgtttcgaacggccaggcagcccagtaaggcacgacggctaaccagtgttcggtttcgacaacggtacggctaccgtctgccagctcgcgctgaacataatccaccagcattggacttttctgttcggcaaaatattctttttgcaggcggtcttcgcgctcagcttcgttaggcaggaagctatttgcccaaatctgaccgtgcggatgcgggttagagcagcccatcgccgcgcctttgttttcaaaaacctgcacccatgggtacgttttccccagttctgcggtttgctcctgccaggttttgacgatttccgtcaatgctgcaacgctgagctctggcagcgttttactgtgatccggactaaagcagatcacccggctggtgccgcgcgcgctctggcaacgcatcagcggatcgtgactttctggcgcatctggcgtgtcagacatcaaagccgcaaagtcattagtgaaaacgtaagtcccggtgtaatcggggtttttatcgcctgtcacccgcacattacctgcgcagaggaagcaatctggatcgtgcgcaggtaacacctgtttggctggcgtttcctgcgccccctgccaggggcgcttagcgcggtgcggactaaccagaatccattgcccggtgagcgggttgtagcggcgatgtggatgatcaacgggattaaattgcgtcatggtcgttccttaatcgggatatccctgtggatggcgactctgccagtgccaggtgtcctgcgccatttcatcgagtgtgcgcgttacgcgccagttcagttcacggtcggctttgctggcgtccgcccagtaggccggaaggtcgccctcgcgacgcggtgcaaaatgataattaaccggtttgccgcaggctttgctgaaggcattaaccacgtccagcacgctgttgcctacgccagcgccgaggttgtagatgtgtacgcctggcttgttcgccagtttttccatcgccacgacgtgaccgtccgccagatccattacgtggatgtaatcgcgtacgccagtaccatcttcggtcggataatcgttaccaaaaatcgccaggctgtcgcgacggcctacagcaacctgggcgatgtatggcatcaggttattcggaatgccttgcggatcttcgcccatatcgccgctcggatgcgcgccaaccgggttgaagtagcgcagcagggcaatgctccagtccggctgggctttttgcagatcggtgaggatctgttccaccatcagcttgcttttgccgtaagggctttgcggtgtgccggtcgggaagctttcaacgtatggaattttgggctgatcgccataaacggtggcggaggagctaaaaataaagtttttgacgttagcggcgcgcatggcgctaatcaggcgcagagtgccgttgacattgttgtcgtaatattccagcggtttttgtacgctttcgcccacggctttcagcccggcgaagtggatcacggtgtcgatagcgtgatcgtgcaggatctcggtcatcaacgcttcgttacgaatatcgccttcaacaaacgttggatgtttgccgcctaaacgctcgataacaggcagtacgatgcgcttactgttacagaggttatcaagaatgatgacatcatgaccgttttgcagtaattgcacacaggtatgacttccaatgtaaccgctaccaccggtaaccagaactctcataattcgctccattaggcttatggtatgaaataaccatagcataacaaagatgcgaaaagtgtgacatggaataaattagtggaatcgtttacacaagaatttagccgttttttatgcgcgattaagtgattataaaacagagggtttatgaatgattgcgctttttatctgaaaaaagacgcggtttcatgcctgcatgcgtcgaaccgttggccggagagggtgctaaggccgcctccggcaaggtcagcactaccgactcaatatatttttgtcagcacatagcgatagagtccaccgtccggcacgaactcaagacgatgggtaatacaggcaggcgcatcttcagcgtggtggctaacaaacaacaattgcgtttcaccttcgctaatcagcacatcaacaaaacggcggataagctggcgattcagcggatcaagcccctgtagtggttcatcgagaataagcaacgtcggatgtttcaccagtgcgcggacaatcagcgccagacgctgctgtccccaggaaagactatggaacggagcgtcagccgtgcgtttatcaatgccgagaatatccagccactgctgcaccagtttttgctggcgatcgctaacggcctgataaatgccaatgctatcaaaatagccagaaagaatcacattacgcacggtagtgctgacccggtaatccagatgcaaactactgctgacgtaaccgatatgctttttgatatcccagatggtttcgccgctgccgcgacgtcgtccgaaaagcgtcaaatcgttgctgtaaccttgcggatgatcgccagtaaccaggcttaataacgtgctttttcctgcaccatttggcccgacaatttgccagtgttcgcctggattcacctgccagctaaggttattaagaatggggcgatcgttataagaaaccacgccattgttcagcacaatgcgcggttcgttggcgggtaaggcgtgacgtgcactaggttcatccggctccggcagttgcacaccttcaagctgttcactatgcgccagttgcgcgacgagtgcttgttggagcagttcctctttagcgccagtttccgctaacgtgcaatccgccagcacgccagcaaactggacaaactccgggatctcatcgaagcgattgagcaccagtaccagagtaataccggactgatgtaagctggcgagtcgctcagccagctgctgacgactggcaacatccaggccatcgaacggctcatcaagaatcaacaagtcaggctcgctcatcagcgcctgacacagcagggtttttcgcgtctcgccagtggaaaggtatttaaagcgtcggtcgaggagggcggtaataccgaactgctgcgccagttgcatgcaacgcggtgcatcctttacttcatcctgaatgatctcagccgtagtgcgtccggtgtcatcttcgccagggccgagcatatcggtgttattccgctgccattcgtcgctgacgagtttttgcaattgctcgaaggagagacgagtgatgtgggaaaactggctttgccgttcacctttcaaaagcggaagttcccccgccagcgcgcgggccagggcgcttttcccgcttccattgctaccgacaaacgcccaactatcacccgcgtttaacgttagctgaggcaattgcagcgtttttgtgtcgctaagacgaaacgtgccttgcaaaatttgcaagctactcattttatatcccactttgtgcagcgattactgacagggatacgtgtttcataacaaattgtcaacacgcttagcacagcgtggcgataatcacgctgtcggcattaaagtaggccgtgacattctgtccttgctgaagagaagtcgcttcatttaccggcactgtggcgcacagtgtttgcccgtcgggtagcgccattaatacttcgcactgctctgcgccgcgctcaatatgactaataatacccggtaattggttgtcagcgttttgcgcgaccgcctcgtcctgagtaatacctacccacggcgcttttagcaatatcaacacttctttgccttcatccagccccagacgcgcgccgctttgtgcggtaattgcgactttcaggcgtgtttttccgtcagccagtaagacatcaacatgctgttgaacgtcatcatgatcgcgggcggtgatggtaccgaaccactggttacgggcgctggtttgcagactaaaacgactgatcgcggccagcaggctgttcagcggcagggcgtcatcgtcacttaacacatcaaaggctttttgctggatttgcgccagtaagtcatagagctgaatcagtcgctgaccatagcgggtcagtactgcgccgccgccacctttaccgcctgttgcgcgctcgaccagaatatgctcacttaactgattcatctcgttaatggcatcccaggcgcttttatagctaataccggcatctttcgctccctggctaatggaaccggaaagcgcaatgtgttttagtaggctaatgcggcgcgggtcggcgaataatttttgttggagcttaagggtgagaaggatttcggcctgcataacaatgtcctggcaaaagtcttattgtgacggaaaacgaacgccacgcaaagctgaccgcacaaaaggggagtgcttttctgtgcttagcggttagaatagtctcatgactatatctggagttgaccatgttagagttattaaaaagtctggtattcgccgtaatcatggtacctgtcgtgatggccatcatcctgggtctgatttacggtcttggtgaagtattcaacatcttttctggtgttggtaaaaaagaccagcccggacaaaatcattgattccctgaatgcccgcttagtcgggcattttctttttctcaacttcctgcttttcctgccgatattttttcttatctacctcacaaaggttagcaataactgctgggaaaattccgagttagtcgttatattgtcgcctacataacgttacattaaggggttaccaatggctcgtaaatggttgaacttgtttgccggggcggcactctctttcgctgttgctggcaatgcactggcagatgaagggaaaatcacggtgttcgccgccgcaagtctgactaacgcaatgcaggacattgctacgcagtttaaaaaagagaaaggcgtggatgtggtttcttctttcgctagcagttctactctcgcccgtcagattgaagcgggtgcgcctgcggatctgtttatttctgccgatcagaaatggatggattatgcggttgataaaaaagcgatcgatacagctacgcgtcagacactgctcggcaatagcctggtcgttgtagcaccgaaagccagcgtgcagaaagatttcaccatcgacagcaaaaccaactggactagtctgctgaatggcggtcgcctggcggttggcgatccggaacatgttcccgctggcatttatgcaaaagaagcactgcaaaaactgggcgcatgggatacgctctctccgaaactggccccagcggaagatgttcgtggggcgctggcgctggtcgaacgtaacgaagcgcctctgggcattgtctacggttctgacgcagttgccagcaaaggggtaaaagtggttgccaccttcccggaagatagtcataaaaaagtggaatatccggttgctgttgtggaagggcataacaatgcgacagtgaaagcattttatgattatctgaagggaccgcaggcagcggaaatctttaaacgttacggatttacaatcaagtaatgatactgaccgatccagaatggcaggcagttttattaagcctgaaagtttcttccctggctgtgctgtttagcctgccgtttgggatcttttttgcctggttactggtgcgttgcacgtttccgggcaaagctctgctcgacagcgtactgcatctaccgctggtgttaccgcccgtggtcgtcggttacttattattagttagcatgggacggcgcggatttatcggtgaacgtctgtatgactggtttggtattaccttcgcctttagctggcgcggcgcggttctcgctgccgccgtcatgagctttccgctgatggtgcgggcaattcgtctggcgctggaaggggttgatgtcaaactggaacaggccgcaagaacactgggggccgggcgctggcgcgttttctttactatcacgttaccgctgaccttaccgggaattattgttggtacggtactggcttttgctcgttctctcggtgagtttggtgcaaccatcacctttgtgagcaacattcctggtgaaacgcgaaccattccttctgccatgtataccctgatccagacccccggcggggaaagtggagcggcgagactgtgcattatttctattgcgctggcgatgatctccctgttgattagtgaatggctggccagaatcagccgtgaacgggcggggcgctaatcatgctggaactgaatttttcccagacgttgggcaaccattgcctgactattaatgaaacgctgcccgccaatggcatcactgctatctttggcgtctccggtgccggaaaaactagcctgattaacgccatcagtggactgacgcgcccgcaaaaagggcggattgtcctcaatgggcgggtactaaatgatgccgaaaaaggtatctgcctgacgccggaaaagcgtcgcgttggctatgtttttcaggatgcgcggctgttcccgcattacaaagtgcgtggcaatctgcgctacggcatgagcaaaagtatggtcgatcagttcgataagctggtggcgcttttaggcattgaaccgttgcttgaccgtttaccaggcagcctgtccggaggcgaaaaacagcgcgtggcgattggtcgggctttgctgacagcaccggaattgctgttgctggatgaaccgctggcgagtctggatattccgcgtaaacgcgaactgttgccttatctgcaacggctgacacgggaaatcaacattccgatgttgtatgtcagccatagcctggatgagatcctccatctggcagacagagtgatggtactggaaaacggtcaggtgaaagcctttggcgcgctggaggaagtgtggggcagtagcgtgatgaatccgtggctgccgaaagagcaacaaagtagcattctgaaagtgacggtgcttgagcatcatccgcattacgcgatgaccgcgctggcgctgggcgatcagcatttgtgggtcaataagctggacgaaccgctgcaagctgcgctacgtatccgcattcaggcttccgatgtttctctggttttacaaccgccgcagcaaaccagcattcgtaacgtattgcgggcaaaagttgttaatagttatgacgacaacggccaggtggaagtggaactggaagtcggcggtaaaacgctgtgggcgcgtatcagcccgtgggccagggatgaactggcgatcaaacctggcctgtggctgtacgcgcaaattaaaagtgtgagcataaccgcctgattaaatcaggtggctataaatgaactgggcaatgctgtcggtggtgttatcaccaatcacaatgttggcgcgcgcttttaccgcgtcatcggcgttgcccatcgccacgcctgtaccagcggcttccagcatactgatatcattaaagttatcgccgaatgccacgacgttttccatgctccaaccttgcgcctcaacccatttcgtcaaacgtttacctttgctgttgccgccgcgtgcaatatcaacctgatcgtgccaggaccattcacactccagtcccagttcatgttcgacatgcttaccaaaatgctgcaattgcggcaggtcatcgtgcgtcagggcgaacttccatacggcgttaacttgttgcgccgtttcagccagagaagcgacttgtgtgaaagtcggacgctgttccggcggcagggtttgcgcccagttagatgtgcgaatgacatgcccggtcgggtgctcatagaccattgcatcatcgacatacatcagaccgtgaatgtggtgttcattcagcatctcaatgagttgcagggctttaataacgggcattgggtccgcttccagcacggtttttgcatgataatcatacaaataggtgccattacagcaaatagcaggtgtatccagcgccagcgcctgataaaaaggatgaatagcgacgtgatggcgacctgtgacgatgattaattgatagcctgcttcgcgagcgcgggccagggcttctatgctactaggaagcagggtctttttcggggtcaataaggtgccgtctaagtcgagagcaatcacgcgtgtggtcatggcgtattccagattaaggttaagaattttcgtctgcgcgaatggtacaccgataccactatcggacaaaattctgcgttttaattcagcattcaccgccaaaagcgactaattttagctgttacagtcagttgctaaatgcaaaggagcattcatgaagcaaacagtttatatcgccagccctgagagccagcaaattcacgtctggaatctgaatcatgaaggcgcactgacgctgacacaggttgtcgatgtgccggggcaggtgcagccgatggtggtcagcccggacaaacgttatctctatgttggtgttcgccctgagtttcgcgtcctggcgtatcgtatcgccccggacgatggcgcactgacctttgccgcagagtctgcgctgccgggtagtccgacgcatatttccaccgatcaccaggggcagtttgtctttgtaggttcttacaatgcgggtaacgtgagcgtaacgcgtctggaagatggcctgccagtgggcgtcgtcgatgtggtcgaggggctggacggttgccattccgccaatatcagtccggacaaccgtacgctgtgggttccggcattaaagcaggatcgcatttgcctgtttacggtcagcgatgatggtcatctcgtggcgcaggaccctgcggaagtgaccaccgttgaaggggccggcccgcgtcatatggtattccatccaaacgaacaatatgcgtattgcgtcaatgagttaaacagcagtgtggatgtctgggaactgaaagatccgcacggtaatatcgaatgtgtccagacgctggatatgatgccggaaaacttctccgacacccgttgggcggctgatattcatatcaccccggatggtcgccatttatacgcctgcgaccgtaccgccagcctgattaccgttttcagcgttagcgaagatggcagcgtgttgagtaaagaaggcttccagccaacggaaacccagccgcgcggcttcaatgttgatcacagcggcaagtatctgattgccgccgggcaaaaatctcaccacatcagcgtatacgaaattgttggcgagcaggggctactgcatgaaaaaggccgctatgcggtcgggcagggaccaatgtgggtggtggttaacgcacactaaccgctgatttacccggcgcagtctctcctgcgccggtgtattaacctatctcctgtaacgcgtgtctctggcgttcgacgatattggtccacaaattgtctttatcgtcagtccataaattaatcagcaaggcaaaaaagcgttctgctgctggagaaagtacggcatctttacggcgaattattcccaatgttcgacgtataacgggttccaccaatgggataccaataatgctagaatagggcgcatgaggcattgccaggccaggaagcgcgctaatccccagtcccgcctccaccagtcctaaactcgtgctaagatgacgcacttcgtaaaaccagtccagcttccagggcttgtcggccagctgttgttctatcaacagtcggttgccgctggaggagcgtacgccaatcattttgtaacccactaactcctgccattctacaagctgctttttggccaatggatggtcacgccgacaggccagcacgaacggctcgttgaccagtggggtaaaatcaatggaactatttgtgacgttgttcatgtttatgccaaagtcactttcgttacacagcacgctttccatgcaattattcgtgccttgttccagaatccgcactttaatattgggatacagctcattaaatttaccgattgccagcggtaaaaaataaaatactgcggtcggaatacacgctaacgtcaccataccacgatgataagcattcatatcacgaatattaaaaagcgtttcatcgaatttctttattaattcccgcgcctccgggagcaacctttttcctgcttttgttaacgtaaccttgcgagttgtacgctcaaatagttgaacatgtaaatcttcctccatcttttttattcttcgcgttaatgcaggttgcgtaatattgagtaatttagcggcattgttaaagctactggactctgccagtatgacaaatgccttcatactacttaattcatgcttcattattactccggaaaatggaaggctgctttttgggtggctggccgttaaaaattttaactgcatttagccaacttaaattaatgaaaaaatgttattaatcgttgagctaaagtcattagagatgctttgcccttaatgtaaccatatcgcaataagttatgtttttaaattgagggcattattatgaaaaaaataccctgcgtgatgatgcgaggtggaaccagcaggggcgcgttcctgttagcggaacatttacccgaagatcaaacgcagcgcgataaaatattgatggcaattatgggttccggtaacgatctggaaattgacggtattggcggcggtaatccactgaccagtaaagtcgccattattagccgttccagcgatccgcgtgctgatgtcgattatctgtttgcgcaggtaatcgttcatgagcaacgtgtcgataccacgcctaactgcggcaatatgctgtctggtgttggggcattcgccattgaaaatggtttgattgcagcgactagcccagttactcgcgtacgtatccgcaacgtcaatacgggtacgttcatcgaagctgatgtgcaaacgccaaatggtgttgtcgagtacgagggtagcgccagaattgacggcgtaccgggtactgccgcaccggttgcgctcactttcctgaatgccgctggaaccaaaaccggaaaagttttcccgactgataatcagattgattattttgacgatgtcccggtgacctgtatcgatatggcgatgccagtcgtcattattccggctgaatatctgggaaaaacaggttatgaattaccggcggaactggatgccgacaaagcattattagcccgcattgaatctatccgtctacaagcgggtaaagcaatgggcttaggtgatgtcagtaatatggttatccctaaacctgtgcttatttctccagcgcagaaaggcggggcaattaatgtgcgttattttatgccgcattcttgccatcgcgcgctggcgataaccggtgctattgctatttccagtagttgtgcattggaaggcaccgtcacccgacaaatcgtcccttctgtaggatacggcaatatcaatattgaacaccccagtggtgcgctcgacgttcatttaagtaatgaaggtcaggatgccacgacgttacgcgcatctgttattcggacgaccagaaaaatattttccggtgaagtttatcttccctgaaaaaattcgttgtcaggataaggacaatcaataaaggacttctgtatgagtcatacagaaagaacaggattttaaatgaataagaaaagcttatggaagctaattctgatattagcgatcccatgtattattggttttatgccagctccggcaggattaagcgaactggcgtgggtgctttttggtatttacctggcggccattgtggggctggttatcaagcctttcccggaacctgtcgtactgttaattgccgttgctgccagtatggtggtggtcggtaacttatccgacggtgcgtttaaaaccaccgccgtattaagcggttactctagtggtaccacctggctggtgttcagcgcgtttaccttaagcgccgcatttgtgaccaccggtttaggtaaacgtattgcctatctgctgattggtaaaatcggtaacaccacgctgggtctgggttacgttacggtattcctcgatctggtactggctccggcaacaccgtctaacaccgcgcgtgcgggcggcattgtgttaccgatcatcaacagcgtggcggtggctttggggtccgaaccggaaaaaagtccgcgtcgtgtcggacattacctgatgatgtccatttacatggtcaccaaaaccaccagctatatgttctttaccgcaatggcggggaacattctggcgctgaaaatgatcaacgacattctgcacctgcaaattagctggggtggatgggcgctggcagccggattgccgggcatcattatgctgctggtcaccccgctggtgatttacaccatgtatccaccagaaattaagaaggtggataacaaaaccatcgctaaagcgggccttgccgaactaggaccgatgaaaatccgcgaaaaaatgctgctcggtgtctttgtgctggcgctgctgggctggattttcagtaagtctctgggggttgatgaatccaccgtggcaatcgttgttatggcaaccatgctgctgctgggtatcgttacctgggaagacgtggttaaaaataaaggcggctggaataccttaatctggtacggcggtattatcggcttaagctccttattaagcaaagttaaattcttcgaatggttagctgaagtctttaaaaataacctggcatttgatggtcacggtaacgttgctttcttcgttattattttcctcagcattatcgtgcgttatttcttcgcttccggtagtgcctatatcgttgctatgttaccggtatttgccatgctggcgaacgtctccggcgcaccgttaatgttaaccgcgctggcactgttgttctccaactcctatggcggcatggttactcactatggcggcgcggcaggtccggtcatctttggcgtgggttataacgatattaaatcctggtggttggtcggtgcggtactgacgatattaaccttcctggtgcatatcaccctcggcgtgtggtggtggaatatgctgatcggctggaacatgctgtaaatattctcgtcatacttcaagttgcatgtgctgcgtctgcgttcgctcaccccagtcacttacttatgtaagctcctggggattcactcgcttgtcgccttcctgcaactcgaattatttagagtatatccatttattatctttctgcgcacttcacggtgcgcagatatctggagcatttgatgatcaagttatctgaaaaaggcgtgtttctcgccagtaataacgaaataattgccgaagaacatttcaccggcgaaattaaaaaagaagaagccaaaaaaggcactattgcctggtctattctctctagccataatacgtccggaaatatggataaacttaaaattaagtttgatagtttagcctctcacgatattacctttgttggtattgtacagaccgctaaagcgtccggtatggaacgtttcccgctgccgtatgtgctgaccaactgccataacagtctctgcgccgtcggcggcactattaacggtgatgaccatgtttttggtttaagcgcggcccagcgttatggcggtatttttgtgcctccgcatattgcggtcatccatcaatatatgcgtgagatgatggcaggcggcggcaaaatgatcctcgggagtgacagccacacccgttacggtgcattagggacaatggcagtcggtgagggcggcggtgagttggtaaaacagctgcttaatgacacctgggatatcgactatccgggcgtggttgcggtgcatctgaccggaaaacctgcgccgtatgtggggccacaggatgtggcgctggctatcattggcgcggtgttcaaaaacggttacgtcaaaaacaaagtcatggagttcgttggaccgggcgttagcgcgctctctaccgatttccgtaacagcgttgacgtgatgaccactgaaacgacctgtttaagttctgtctggcaaaccgatgaagaagtccataactggctggcgctgcacggtcgcggccaggattactgccagcttaaccctcaaccgatggcgtactacgatggctgcatcagcgttgatttaagcgccatcaaaccaatgattgcgctgccgttccacccgagcaacgtgtatgaaatcgacacactgaaccagaacctgaccgacattctgcgtgagattgaaattgagtccgaacgcgtggcgcacggtaaagccaaactcagcctgctggataaagtggaaaatggtcgcctgaaagtgcagcaggggattatcgcgggctgttctggcggtaactacgaaaacgtcatcgcggcggcgaatgcactgcgcggtcaatcctgtggcaatgacaccttcagcctggcagtttacccgagtagtcagccggtgtttatggatctcgccaaaaaaggtgtggtagcagatttgattggcgcaggcgcaatcatcagaaccgcgttctgcggcccatgctttggcgcgggcgatacgccaatcaacaacggtttgagtattcgccacaccacgcgtaacttcccgaaccgcgaaggctctaagccagctaatgggcagatgagtgcggtggcgttgatggacgctcgttctatcgctgcgactgcggcaaacggtggctatttaacctctgccagcgaacttgattgctgggacaacgtgccggagtacgccttcgatgtaacgccgtataaaaaccgtgtttatcagggctttgtgaaaggggcaactcagcaaccgctgatttacgggccgaacattaaagactggccggaattgggtgcgctgactgacaatatcgtcctgaaagtgtgcagcaagatcctcgacgaagtgaccaccaccgacgaactgattccttccggtgaaacctcttcttatcgtagtaatccgattggtctggcggagtttaccctgtctcgccgcgatcccggttatgttagcagaagtaaagcgactgctgagctggaaaatcagcgtctggcggggaatgtcagcgagctgacagaggtgtttgcgcgcattaagcagattgctggtcaggagcatattgatccgctgcaaactgaaattggcagcatggtctatgcggtgaaaccaggcgatggttctgcgcgtgaacaggcggcgagctgccagcgtgtgattggcggtctggcgaatattgccgaggagtacgcgactaaacgctatcgttctaacgtcatcaactgggggatgttaccgctgcaaatggcggaagtaccaacctttgaagtgggggattacatttacatccctggcattaaagcggcgctggataatccgggtacgacgtttaaaggttatgtgatccatgaagatgcgccggtaacggaaattacgctctatatggaaagtctgactgctgaagagcgcgagattatcaaggcgggtagtttgattaacttcaataaaaaccgtcagatgtaaaaagcgccatgtgaatgtaggtcgcattcggcacttattgtcggatgcgatgcttgcgcatcttatccgacctacgaatcgcatcgaatctgtaggccagataaggcattttcgcagcatccggcacttattgtcggatgcgatgcttgcgcatcttatccgacctacaaatcgcatcgaaccgtaggccggataaggcgtttacgccgcatccggcaaatagttaattgcccttacttcttcgcctctgcaaccactttactacccacgccgcggttattgtattcccacatgcggttgtagttagtgtcattcagattgcgctgtatttcgtcgttatcatctacgctgccggtattacccgcaaacggacgattagagatcaccgcatcggcccacggtttagccgtgttaaaaccttcgttgatggcgctatcacggatcaccacctgaccgttggtattggcatcaacatccaggctgcggcccagttgcgccacaccatcaccgaaagcattgaaacggctgtttacggcgaggaaaccgtagtaaatgttggacagcgtagccggtgcaaacacatacgcttcttgctgagtacgactgttcaccacgcggaattcggtgttatcgaacaccactgcgccgcgaccagaaacgatatccacatccccttcaatgtagctgttggtcaccagcgtacgcggctgacgattcgtttccagacggttctgcacaccgctgttggtgacaaagaaggtgttctgacgaccgagaatgttaacgttgttaatctgtacctggtcaccatcagtacgcagtgccaccgccggatggttacctgcatctacgctatcgcccagcgtgttttcgatggtcagattttgcagttgcaggccattgttttgactccagaagaccgcagagcagagaacaccgatactgtcgctgcgtttgctctggcagctatcgtacatataccacgctggtttacctggcatatatttgccgcgcgggttgacgtcgtgacgccagtcggcagggctcatgccaccatcaagggaaagcccaatcttcacatcaatcggtttttcacctgtaccgtacagagtaattccacccggagcggcagggacatataccgttccctgatactcaccaggcatcacggcaatatactggcgcttgttggtacgcttgataattgccgcatctaccgccgcctgaatcgtggtatgcgttacaccttgagtgcccgccgggccgacaacaaagtcaggttgcgcaggcagggtaatcggggaaggattccacgctgcagcacctggtgtcagggatgcaaaatagtgttgagcatcgaaattctgcgcttcttttgcgctcagaatcgggcgagaagaggtaccaggcgcggtttgatcagaaggacgttgatcgggcggggtactgctacaggcggtcagcgtcacgccaaaagccaatgccagcgccagacgggaaacactaaatgtgttcacaggttgctccgggctatgaaatagaaaaatgaatccgttgaagcctgcttttttatactaacttgagcgaaacgggaaggtaaaaagacaaaaagttgtttttaatacctttaagtgataccagatggcattgcgccatctggcagagtgattaactaaacatcgcagtaatgctggcgcttgccagagagtggaaatgaacgttaaacccgaccatcgcgccgctggcaccttcatcgacatcaatacgttctatatccagcgcgtgaacggtaaaaatgtagcgatgagtttcgcctttcggcggtgctgcgccatcgtacccggttttaccaaagtcggtacgcgtctgcaaaacgccgtctggcattgctaccagaccagagccaaacccttgcggtaatacgcgggtatcagcgggtaagttaacaactacccagtgccaccagccggagccggttggcgcatccgggtcgtagcaggtgacaacaaaacttttcgttcccgcaggaacatcatcccacgccagatgcggactaatattatcgccatcgtaacccatgccgttaaagacatgacgatgcggcaatttatcgccatcgcgcagatcgttactgatgagtttcatgaaccctcctttcttgtttgcagaaagtgtagccagaaaccctcacgcggacttctcgttattggcaaaaaaatgtttcatcctgtaccgcgcggttaaccgctgcggtcagacgctgcaactgttgcgggagaataatatagggcggcatcaggtaaatcagtttgccaaaaggccggatccagacaccctgttcgacaaagaatttttgcagcgccgccatattcaccggatgagtggtttcgaccacgccaatggcccccagtacgcgcacatcggcaaccatttcggcatcacgggcgggggcaagttgctcgcgcagctgtacttcaatatccgccacctgttgctgccagtcgccagattcgagaatcgccaggctggcgtttgctgccgcgcaggccagcggattgcccataaaagttggcccatgcataaagcaaccggcttcaccgttactgatggtttctgcaacctcgcgcgtggtgagtgtggcggaaagggtcattgtgccgccggttaaggctttaccgaggcacaaaatgtccggcgcgatttctgcatgttcacaggcaaacagtttcccggtacgaccaaatccagtggcgatctcgtcggcaatcagcaagataccttcgcgatcgcatattttgcggattcgttttaaccattccggatggtacatgcgcatcccgcctgcgccctggacaatcggctcaatgatcaccgccgcgatttcatgacgatgcgccgccatcaggcgggcaaagcccaccatatcgcgctcatcccattcgccatccatgcggctttgcggggcgggagcaaacaggttttctggcaggtagcctttccacagactgtgcatactgttatccggatcgcacacgctcatcgcgccaaaggtatcgccatgataaccattgcggaaggtcagaaaacgctggcgcgcttcgcctttggcttgccagtactgcaacgccattttcatcgccacttccaccgctacggaaccggagtccgcgagaaaaacgcactccagcggttgcggcgtcatcgccaccagtttgcggcacagctcaatggctggcgcatgggtgataccgccaaacatcacatggctcatggcatcaatttggctcttcatcgccgcattaagctgcgggtgattgtagccgtggatcgccgcccaccaggagctcataccgtcaaccaggcgtctgccgtcagacaaaatcagctcgcaaccttcggcgctcaccaccggataaaccggcagaggggaggtcatggatgtgtatgggtgccagatatggcgttggtcaaaggcaagatcgtccgttgtcataatcgacttgtaaaccaaattgaaaagatttaggtttacaagtctacaccgaattaacaacaaaaaacacgttttggagaagccccatggctcaccgcccacgctggacattgagccaagtcacagaattatttgaaaaaccgttgctggatctgctgtttgaagcgcagcaggtgcatcgccagcatttcgatcctcgtcaggtgcaggtcagcacgttgctgagcattaagaccggagcttgtccggaagattgcaaatactgcccgcaaagcagccgctacaaaaccgggctggaagccgagcggttgatggaagttgaacaggtgctggagagcgcgcgcaaagcgaaagcggcaggaagcacgcgcttctgtatgggcgcggcgtggaagaatccccacgaacgcgatatgccgtacctggaacaaatggtgcagggggtaaaagcgatggggctggaggcgtgtatgacgctgggcacgttgagtgaatctcaggcgcagcgcctcgcgaacgccgggctggattactacaaccacaacctggacaccagcccggagttttacggcaatatcatcaccacacgcacttatcaggaacgcctcgatacgctggaaaaagtgcgcgatgccgggatcaaagtctgttctggcggcattgtgggcttaggcgaaacggtaaaagatcgcgccggattattgctgcaactggcaaacctgccgacgccgccggaaagcgtgccaatcaacatgctggtgaaggtgaaaggcacgccgcttgccgataacgatgatgtcgatgcctttgattttattcgcaccattgcggtcgcgcggatcatgatgccaacctcttacgtgcgcctttctgccggacgcgagcagatgaacgaacagactcaggcgatgtgctttatggcaggcgcaaacagcattttctacggttgcaaactgctgaccacgccgaatccggaagaagataaagacctgcaactgttccgcaaactggggctaaatccgcagcaaactgccgtgctggcaggggataacgaacaacagcaacgtcttgaacaggcgctgatgaccccggacaccgacgaatattacaacgcggcagcattatgagctggcaggagaaaatcaacgcggcgctcgatgcgcggcgtgctgccgatgccctgcgtcgccgttatccggtggcgcaaggagccggacgctggctggtggcggatgatcgccagtatctgaacttttccagtaacgattatttaggtttaagccatcatccgcaaattatccgtgcctggcagcagggggcggagcaatttggcatcggtagcggcggctccggtcacgtcagcggttatagcgtggtgcatcaggcactggaagaagagctggccgagtggcttggctatagccgggcactgctgtttatctctggtttcgccgctaatcaggcagttattgccgcgatgatggcgaaagaggaccgtattgctgccgaccggcttagccatgccagtttgctggaagctgccagtttaagcccgagccagcttcgccgttttgctcataacgatgtcactcatttggcgcgattgcttgcttccccctgtccggggcagcaaatggtggtgacagaaggcgtgttcagcatggacggcgatagtgcgccactggcggaaatccagcaggtaacgcaacagcacaatggctggttgatggtcgatgatgcccacggcacgggcgttatcggggagcaggggcgcggcagctgctggctgcaaaaggtaaaaccagaattgctggtagtgacttttggcaaaggatttggcgtcagcggggcagcggtgctttgctccagtacggtggcggattatctgctgcaattcgcccgccaccttatctacagcaccagtatgccgcccgctcaggcgcaggcattacgtgcgagcctggcggtcattcgcagtgatgagggtgatgcacggcgcgaaaaactggcggcactcattacgcgttttcgtgccggagtacaggatttgccgtttacgcttgctgatagttgcagcgccatccagccattgattgtcggtgataacagccgtgcgttacaactggcagaaaaactgcgtcagcaaggctgctgggtcacggcgattcgcccgccaaccgtacccgctggtactgcgcgactgcgcttaacgctaaccgctgcgcatgaaatgcaggatatcgaccgtctgctggaggtgctgcatggcaacggttaataaacaagccattgcagcggcatttggtcgggcagccgcacactatgagcaacatgcagatctacagcgccagagtgctgacgccttactggcaatgcttccacagcgtaaatacacccacgtactggacgcgggttgtggacctggctggatgagccgccactggcgggaacgtcacgcgcaggtgacggccttagatctcagcccgccaatgcttgttcaggcacgccagaaggatgccgcagaccattatctggcgggagatatcgaatccctgccgttagcgactgcgacgttcgatcttgcatggagcaatctcgcagtgcagtggtgcggtaatttatccacggcactccgcgagctgtatcgggtggtgcgccccaaaggcgtggtcgcgtttaccacgctggtgcagggaagcttacccgaactgcatcaggcgtggcaggcggtggacgagcgtccgcatgctaatcgctttttaccgccagatgaaatcgaacagagcctgaacggcgtgcattatcaacatcatattcagcccatcacgctgtggtttgatgatgcgctcagtgccatgcgtagcctgaaaggcatcggtgccacgcatcttcatgaagggcgcgacccgcgaatattaacgcgtagccagttgcagcgattgcaactggcctggccgcaacagcaggggcgatatcctctgacgtatcatctttttttgggagtgattgctcgtgagtaaacgttattttgtcaccggaacggataccgaagtggggaaaactgtcgccagttgtgcacttttacaagccgcaaaggcagcaggctaccggacggcaggttataaaccggtcgcctctggcagcgaaaagaccccggaaggtttacgcaatagcgacgcgctggcgttacagcgcaacagcagcctgcagctggattacgcaacagtaaatccttacaccttcgcagaacccactagcccgcacatcatcagcgcgcaagagggcagaccgatagaaagtttggtaatgagcgccggattacgcgcgcttgaacaacaggctgactgggtgttagtggaaggtgctggcggctggtttacgccgctttctgacactttcacttttgcagattgggtaacacaggaacaactgccggtgatactggtagttggtgtgaaactcggctgtattaatcacgcgatgttgactgcacaggtaatacaacacgccggactgactctggcgggttgggtggcgaacgatgttacgcctccgggaaaacgtcacgctgaatatatgaccacgctcacccgcatgattcccgcgccgctgctgggagagatcccctggcttgcagaaaatccagaaaatgcggcaaccggaaagtacataaaccttgccttgttgtaaccattctgtatttggttaaattgcgagcgagatcgcgtcttcgattgactgcaatttaaccaattaaattctaaaataatcacgaaaaaaattttacttccgcctcatgcggcgaatgtgggaattgcccaggcggcgggggataggggctggagacagttatccactattcctgtggataaccatgtgtattagagttagaaaacacgaggcaagcgagagaatacgcggcttgcacgcgaattggcgttaaagacggctcaaagaaatatcttttattttttaactggttagataaatgcaatggcagtcactgaacaggcatctcttgccataaaactgtcatcactcatcttgacaaatgttaaaaaagccgttgctttggggataacccggtaaggccggagttttatctcgccacagagtaaattttgctcatgattgacagcggagtttacgctgtatcagaaatattatggtgatgaactgtttttttatccagtataatttgttggcataattaagtacgacgagtaaaattacatacctgcccgcccaactccttcaggtagcgactcatgagtaaaccgttcaaactgaattccgcttttaaaccttctggcgatcagccagaggcgattcgacgtctcgaagaggggctggaagatggcctggcgcaccagacgttacttggcgtgactggcagtgggaaaaccttcaccattgccaatgtcattgctgaccttcagcgcccaaccatggtacttgcgcccaacaaaacgctggcggcccagctgtatggcgaaatgaaagagttcttcccggaaaacgcggtggaatatttcgtttcctactacgactactatcagccggaagcctatgtaccgagttccgacactttcattgagaaagatgccagcgttaacgaacatattgagcagatgcgtttgtccgccaccaaagcgatgctggagcggcgtgatgtggttgtggtggcgtctgtttccgcgatttatggtctgggcgatcctgatttatatctcaagatgatgctccatctcacggtcggtatgattatcgatcagcgcgcgattctgcgccgactggcggagctgcaatacgctcgtaatgatcaagcattccagcgtggtactttccgcgttcgtggcgaggtgatagatatcttcccggcagaaagcgatgacattgcacttcgcgtggaactgtttgacgaggaagtggaacgattgagcttatttgacccgctgaccgggcagattgtttccactattccacgttttaccatctacccgaaaacgcactacgtcacaccgcgcgagcgcatcgtacaggcgatggaggagatcaaagaagagctggccgccagacgcaaagtgctgttggaaaacaacaaactgctggaagagcagcggctgacccagcgtacccagtttgatctggagatgatgaacgagctgggctactgtagcgggattgaaaactacagccgcttcctctccggtcgtggaccgggtgagccaccgccgacgctgtttgattacctgcctgccgatgggctgctggtcgtcgatgaatctcacgtcaccattccacaaattggcggcatgtatcgcggtgaccgggcgcgtaaagagacactggtggagtacggcttccgcctgccaagtgcgctggataaccgtccgcttaagtttgaagagttcgaagcattagcgccgcaaaccatctatgttagcgcgacgccgggtaattacgagctggaaaaatccggcggcgatgtggtggatcaggtggtgcgtccaaccggattgcttgacccgattatcgaagtgcggccggtggcgacacaggttgatgatcttcttagcgagattcgtcagcgagcggcaattaacgaacgcgtactggtcaccacactgaccaagcggatggcggaagatcttaccgaatatctcgaagaacatggcgagcgcgtgcgttatcttcacagtgatatcgacaccgtcgaacgtatggagattatccgcgacttgcgtctgggtgagttcgacgtgctggtagggatcaacttactgcgcgaaggtctggatatgccggaagtgagcctggtggcgatcctcgacgctgacaaagaaggcttcctgcgttccgaacgtagcttgatccagaccattggtcgtgcggcacgtaacgttaacggtaaagcgattctctacggcgataagatcaccccaagtatggcgaaagcgattggcgaaaccgaacgtcgccgtgagaaacagcagaagtacaacgaggaacacggaattacgccgcaaggcttgaacaagaaagtggtcgatatcctggcgctggggcagaacattgccaaaaccaaagcgaagggcagaggaaaaagccgcccgattgttgagccggataatgtgccgatggatatgagccctaaagcgttgcagcagaaaatccatgagctggaagggttgatgatgcaacacgcgcagaatctggagttcgaagaagcggcgcaaattcgtgaccagttgcatcagctgcgtgagctgtttatcgcggcaagctaacaggatagcgaagaagactgatgacaaacggaaaacagcctgatgcgctacgcttatcaggcctacattttctccgcaatatattgaatttgcgcggtttgtaggccggataaggcgttcacgccgcatccggcataaacaacgcgcactttgtcttcaataggaagccggaattttccttcggatttccgttaacctaaagcctgtaacgccttttccagcgcgttatgtaacaactggcggtcatgacgatacggaatatcgctggcctccagtacctcctggatcacaatccgctctttcaccgcgctgacatccacttttggcccgacgatgaccgcatcaatgacctttttaccaacatactgctccataattgccagcttgctttccagcttcaaattagccgcaggtaaactcaactcacgccccagattgccgatataaaccatcggcgctggcgtgcggcgtaatgcctgggcgatttccttcagcagcagaattggcatcaggctggtataaaaactgccaggcccaataatgatgagatccgcttcattgatagcgtgaaccgcctcacgcgttgcgggtacattaggcgttaacaataactcttgaatcggcgtagttaactggtcgatattgacctcgccgtaaacttcatgcccctgatcgtcaatcgccatcagatcaacaggatgctcactcattggaatcaaatgcgtatccactttcagcagattacgaattaaattgatggcttccagaggccgcacgctaaggtgatccagcgcctttaacatcaagtttccgagattatgaccggaaagttcgccattgccaccaaaacggtattcaaacatcgcggaggcgacgctcggttccgttatcagctggttgaggcagttgcgcatatcgccccaggcaatgccgccttcactacggcgaatacgccccgtgctgccaccattatcggtggtggtgacgatacccgttaaacgagaacccaaagagctaagactactgagaacgcgtcccagtccatgccctccgccgagagcaacgacacgatcaagatcagccagcgtacgattgcgcatatagtttcctggagtcagattatccgcgctacagtagcgcaaattgcggggaaacagcaattaacctgccaatattgaggatacaaactattttcttctacctctaaaggacgatgcacgctatgcctccctgatgatgtatatcaaagtaaaaccgccattttcccttattctgtagcgaaatagcacgatcatgacgctatatacatgattacatagcgaaagtgtggatggtaaaaatctcatttacacgctagtatcggcataaccactaaacactctagcctctgcacctgggtcaactgatacggtgctttggccgtgacaatgctcgtaaagattgccaccagggcgaaggaagaaatgacttcgcctcccgtatctggaaaggtgtacatggctagtcaactgactgatgcatttgcgcgtaagttttactacttgcgcctgagcattaccgatgtgtgtaactttcgttgcacctactgcctgccggatggctacaaaccgagcggcgtcaccaataaaggctttcttaccgtcgatgaaattcgccgggttacgcgcgccttcgccagactgggcaccgaaaaagtgcgcctgacaggaggagagccgtctttacgccgcgactttaccgatatcatcgccgctgtgcgggaaaacgacgctatccgccagattgcggtcacaaccaatggttaccgtctggaacgcgatgtggcgagctggcgcgatgcgggacttactggcattaacgtcagtgtcgacagtctggacgcccgccagtttcacgctattaccgggcaggataaattcaaccaggtcatggcagggattgatgctgcatttgaggccggttttgagaaggtcaaagtcaataccgtgctgatgcgtgatgttaatcatcaccagctcgacacctttctgaactggatccagcatcgccctatccagctgcgtttcatcgaactgatggaaacgggcgagggcagcgagctcttccgtaagcatcacatctctggtcaggttctgcgtgacgagctactgcgtcgcggctggatccaccaattacgtcaacgcagcgacggtcccgcgcaagtcttttgccatccagattacgccggagagattggccttatcatgccgtatgaaaaagacttctgcgccacttgcaaccgcctgcgcgtttcctccattggtaaactccatctctgcctgtttggtgaaggcggcgttaacctgcgcgatctgctggaagacgatacccagcaacaggcgctggaagcgcgtattagtgcggcgctgcgggagaagaaacagacccatttcctgcatcaaaacaacaccggtattacgcaaaacttaagctacattggcggctaaaacgtcaaaaggagagatcagatgagtcaggtaagcactgaatttatcccgacccgtattgctattcttacggtttctaatcgtcgcggtgaagaagacgatacctccggtcactatctgcgcgatagcgcgcaagaagcgggccatcacgttgtcgataaagccattgtgaaagaaaaccgctacgctattcgcgctcaggtatctgcgtggatcgccagcgacgatgtacaagtggtattgattacgggtggtactggcctgacggaaggtgatcaggctcccgaagcattgctgccgttgttcgaccgtgaagttgaaggttttggtgaagtgttccggatgttgagctttgaagagattggcacttccacgttgcaatctcgtgcggtagcgggcgtcgccaacaaaacgctgattttcgccatgccgggtagcaccaaagcgtgccgtaccgcatgggaaaatatcatcgcgccgcagctggatgcccgtacgcgtccgtgtaatttccatccacatttgaagaaataagtatgagccaactgacccatatcaacgccgctggcgaagcgcacatggtggatgtctccgccaaagcggaaaccgtgcgtgaagcgcgggcggaagcctttgtcaccatgcgcagcgagacgctggcgatgattattgatggtcgccaccacaaaggcgacgtatttgccactgcgcgtattgccggtattcaggcggcaaaacgcacctgggatctgatcccgctctgtcatccgctgatgctcagcaaagttgaagtcaatttacaggccgagccggagcacaatcgggtgcgtatagaaaccttatgccgcctgaccgggaaaaccggtgtcgaaatggaagcattaaccgcggcctccgtggcggcgctgaccatttatgacatgtgcaaagcggtgcaaaaagatatggtgattggtccggtacgtttgctggcgaagagcggcggcaagagcggtgactttaaggtggaagcggatgattaaagttctttttttcgcccaggtgcgcgagttggtgggaacagatgcaaccgaagtggctgcggatttcccaactgttgaagcgttacgccagcacatggctgcgcagagcgatcgctgggcgctggcgctggaagatggcaaattactggctgccgtcaaccagacgctggtgagttttgaccatccgctgactgacggcgacgaagtagctttcttcccgccggtaaccggaggttaagatggcagaaaccaaaattgttgttggtccgcagccgttcagcgtaggagaagagtacccgtggctggcggagcgtgacgaagacggtgcggtagtcacctttactggtaaggtgcgcaaccataacctgggcgacagcgtcaacgcattaaccctcgaacactatccggggatgactgaaaaagcactggcagaaattgttgatgaagcgcgtaaccgctggccgctggggcgcgtcactgtgattcaccgcatcggggaattatggccgggcgatgaaatcgtttttgtcggtgtcaccagtgcgcatcgcagcagtgcgtttgaagccgggcagtttattatggattatctcaaaacccgcgcaccgttctggaagcgcgaagccacgccggaaggcgaccgctgggttgaagctcgggagagcgatcagcaggcggcaaaacgctggtaattttttgttagccggataaggcaccgctgcgtccggcaatttcaccgctcagtacatacgtttacgctgcgtcgatgcacagcctcatcattttgcagtatccttaagatattccttatatcttcaggagatcgtcatggacagattcccacgttctgatagtatcgtacaaccccgggctggcttgcaaacttatatggctcaagtctatggctggatgaccgttggcttgttgctgaccgcatttgttgcctggtatgcggctaattccgcggccgtgatggagctgttgttcactaaccgtgtctttttaatcggtctgatcatcgcgcaattagcattggttattgtgttaagtgcgatgattcaaaagctgagcgcaggtgtaacgacgatgctctttatgctttatagcgcgctgacgggtcttacgctttccagtatattcattgtctataccgctgcttctatcgccagtactttcgtcgttactgccgggatgttcggcgcaatgagcctgtacggttacaccacgaagcgcgatttaagtggctttggcaatatgctgtttatggcgttaatcggcattgtgctggcaagcctggtcaacttctggttgaaaagcgaagcattgatgtgggcagttacctacatcggcgtgattgtctttgtcggattgacggcgtatgacacgcagaaactgaaaaatatgggtgagcagattgatacccgcgacacgagcaacctgcgcaaatattccattcttggcgcgttaaccttgtatctggacttcatcaacctgttcctgatgttgttgcggatcttcggcaaccgccgttaattctttttcaccatcactatcccggccatgtgtcgggatttttttcttactaaaaacgacacttaacaagtaccaggtataaaatatgccttatggacgagcggaagcgttttctgtatccataaatgcaaaagtattttgtatgcgtggttttaaatttattgatggtgaatattaatattttttctaaggataactaaaagaatggaaagttacagccaaaacagcaataaattagattttcagcacgaggccaggatattaaacggtatatggctcattaccgctttaggtttggtggcaaccgcaggactagcctggggagctaagtatatcgaaattacggcaaccaaatatgatagtccaccaatgtatgtcgccatagggttattattactttgtatgtatggcttaagtaaggatatcaacaagataaatgccgccatcgcgggcgtaatatatctgtttttactctctttggtggcgattgtcgttgcaagtttagttcctgtatatgccattatcatcgtgttcagcactgcgggcgcgatgtttttaatcagtatgctggccggtttattatttaatgttgatcctggttctcaccgttttatcattatgatgacgttgacagggttggccctggtaatcatcgtgaatgcggcattaatgagtgaacggcccatttggataataagttgcttaatgattgtgttatggagtggcattatcagccatggacgaaataagctccttgaattggcggggaaatgccatagtgaagagttgtggagtccggttcgttgcgcttttacaggtgcattaacactctattactattttatcggcttctttgggatacttgccgcgatagctataacgcttgtctggcaaaggcatacgcgtttttttcattaaccgtaaatgcacatactaaagaacttaactaaacttcacatcgccgcttcatttttcgcccgtagcttcttcgcctggctttccagcaacaggtaacagatcagcgccagcagcagtgggataaagtaatacagcacacggtaagcgagtagggcggcgataattgtacctttggaggtatgctccccagccagtagtgcgataaacaccgcttccagcacaccgatccccgccggaatatgcacgatgacgccagcaatactactaaccagtaacacgcccagtacaaagaaatagttcacgctttgaccaagtaacagccagataatcgcccccattaccatccagttaacgctggaaatcagcatctgagcgagggcgaatttccaactaggcagcaccagcttttgccctttgatggtcatatggcggtgcttcgcgaaagcgcaaaaccacaaataaaccgcgataatcatcagtaagccaatgccgagaatacgcagcgtagtttgatcgacataccagtgatccggcaactccaccacgcctgcggtaaagataatccctgccagtaaaatgtagcccagccagttggtggtaatactgaggctgaaaatccgcgtaatagtgctaccgggcaaccccagacgagagtacaaacgatagcgcataccaatgccgccgacccaggtactgagcgtcaggttgaaggcgtagcagataaagctcaccagcatcacctggcgcttcgccagtttgtgaccgcagtaaaagcgggcgagcaggtcatagcagccgtaaatcagatagctgacgaccaccagcccgaccgcactaagcagcgcaacgcgattgtagtcgcggatgaccttccagacctcttcccagtccacttttttggcgtagaccaccagcaacacaatcaccgcgataaaaaacagccaggtgaggatcttctttgctaagcgccagcgcgggtgacttttactcatcagggttttacccccgtgttttcagtttctacccgatcctgcgtttccattgtcggttgtgcgggcggatcaacctgcgccagacgtggcgtgtgtgccggaagccagccaaccagcgccgggaagtggcgtaaaaagtggaacgccagcacgcttttggtcaggttccaccaggtgcgtttgggcagcatggtttcatccacctgctgacaatctgcggcaataatgccgttcagattatcgcgcagcgtctggttaaaatgacgatcgtggatgatgacatttgcttcgagattcagactcaaactgagcggatcgagattactggaccctactgtcgcccagtgatcgtccatcaatgccactttgccgtggagcgggcggcggcggtactcaaaaacctgaacgccgcctttaaccagatagttatacagcaagcgcgcaccgactctgacaatcggcatatccggttcgccctgaatgatcagtttgatccgcaccccgcgccgtgccgctttacgcaaggcgtgtaaaaatcgatagccggggaagaagtaggcgttggcgataatcacttcccgccgcgcctgagtgagcattttcaaataatggcgttcaatatcatcgcgatgttcttcgttatcgcgccagaccagcaatacctgcgcttctcccggctggcggttctcttccgctttgtgatgacgtcgccaccagcgtcgtgccgcgctctgtccaggcaggttttccagctcaaactggagaatatcttcgacaatcggcccttcaaggcgtaccgcgtaatcctgtttagcctctggaccgtagctggacatatgctcggcggagtaattcagcccgccaataaaggctatacgcgcgtcgatcaccacaattttgcgatgcatccggcgaaacacattggtgcgcataccaaaaaggcgagggcggggatcgtagtagcggaacactacgccagctgccgtcagttcattgacaaactcatcgctgagatccgggctaccgtagccatccagcaagacttccgctttaaccccgcgttgcgctgctgccagtagtgccgcatgcagttgtttgccgacgtcatcctcaaaccagataaacgtttcaagaatgatgcgttcttgtgcctcgccaatcgccttaaacaccgcgggataatattgctcgccgttttccagcaactggatcttattgccttcgcgccagctacatttcataaatgaatctccgcacttaaaggggcatgatcagaaaggtgtcgccatgtccgcagcggcaacgcggttggcgcgctggcgctggcatttttgacgtagatcctgtccagtcgtagtagaggaaattgcaccggaaacgtgcgcgccgggcgtccgtgggcgcgggtaaaaatctcatccagtccggcctgcacttttaacggatgattagctttttgccgccagtcattgaaatcacccgccaccaataccggttcgccgtccggtagctcattcacccattcggcgagcatcgcaagctgcgcctgacggtgcgcctcacgcaggcccagatgtacgcacatcacatgaatcgcttttccggtcatcggcggcacaatgcggcagtagagcacgccgcgcttttccgcaccatcgacgctaacatcgcgattctcataatgttcaatgggataacggctcagtacggcgttgccgtgatgcccttccgggtatacggcattgcgaccgtaggcaaaatcgctccacatagtgtcggcgagaaactcgtagtggctggtatcgggccagttttccacatgcagcggatgaacttcgtgcgcgcccatcacttcctgcaggcaaacaatatcggcgctgacggtacgcacggcgtcgcgaagttccggcaaaatgaagcgtcggttaaacgcggtaaagcctttgtgaatattgatggtgagcaccttgaagctaaattgttgtgtttgatcgggcataattttcctgtctttgcctcttatctcattgaaatagtgtagtcggcgtcacaaaaaggtgcggtcttacggaattttccgtaaagttcggtactctgagtaagtagagataaattcttcaggagagaagccatgaagtggcaacaacgtgttcgtgtcgcaacgggtctaagttgctggcagattatgttgcatttactggtagtggcgctgctggtggtgggctggatgagtaagactctggttcacgtcggcgtgggattatgcgcactgtattgtgtcacggtagtgatgatgctggtgtttcagcgccaccccgagcaacgctggcgtgaggtggcagacgtgctggaagagctgaccacgacctggtattttggcgcagcgctgattgtgctgtggctgttgtcccgcgttctggaaaacaactttttgctggcaattgcagggctggcaatccttgccggcccggcggtagtgtctttgctggcgaaagataagaagttacatcaccttacgtctaaacatcgcgtacgccgctgattacatcaccttacgtctaaacatcgcgtacgccgcactccctgtcgtggccgttatcaccagtagcggccacaaactattccacacaatatccagactcgcatccttcaaataaatctgcttggtaatgtccgtaaagtggcgaatagggttaatccacgtcaggttttgcagccataccggcatgttttccaccggagaaacgtaaccggaaaggagaatggcgggcatcataaagacaaacacgccgataaacgcctgctgttgtgtactacagagactactaatcaacagaccgaatcccaccaggcttaaaccataaatcaccatcgtaaagtagaacagcgccaggcttccggcgaaggggatttgatacgcccagataccaatcgccagcacaatggtggcctggaaggtggcgacaattaacgccggtacggctttgccgatgaagatctgccaggtggtgagcgggctaaccagtagctgatcgagcgtaccttgttcacgttcgcgggcgacggaaagactagtgacgatcattacgccgatagtggtgatcatggcgatcagactcggcaccacaaaccatttgtagtcgagattcgggttataccagttgcgtaccaccagctcgctgttgttaggtttcggttttccttccagcagctcctgctgataatttttgacgatctgttgcaggtagttggcggcaatttgcgcactgttggagttacgcccgtcgaggatcaactgcaaaggcgcggtctggaaggtatccagtttgcggctgaagtcagccgggaaacgcaccagtagtaacgccttttgtgtgtcgatggttgggcggatctcctgtgggcttttcagcagcagcacatgagtaaaggcgctggcgcgggcaaaacgttgggtcagctccacgctatgctcgccgttatcttcatcgtagatggcgatggtggcgttagtcacttccagcgtggcggcgaacgggaacaggatcacctgaattagcacgggtaaaatcagaatcgcgcgggtttgcggttcgcgcagcaagctctgcaactctttgcggattaacgtccataagcgatgaaacatgctcttctccttaatccagccgacgtttggttttcagccacgtcaggccgataaacatcaccgcgctagcgatcaaaaacagcacgtttaccaccagcaccactggaatattcccggcgaggaacaggctttgcagggtgctgacgaaataacgagcgggaataatgtacgtcaccgcgcggatcaccgcgggcatactgtcgatctgaaaaataaagccggaaagcataatgctcggcagaaaagcggcgttcagggcgacctgagcggcattgaactggttgcgggtaatcgtggaaatcagcagccccatccccagggtactgagtaaaaacaggctggagataaaaaacagaatcagcaggctcccgcgatacggcacgccgagaataaacacactcaccagcatacacagcaacatcgccagcatcccgagaaagtaataagggatcagcttacacagcagcagttccgtgcgggtaatctccgtagagagcagagcctccatggtgccgcgttcccattctcgcgccaccaccaggctggtgagaatcgcgccgatgaccgtcatgataatggtcaccgcaccggggataatgaagtgctggctaatcgccgccgggttaaaccagtagcgggtttgtacatcaataagcggttcaaaagtctgcccgttgtcctccgctcgctgcatttgccagatctgccagatcccttcgacatacccctgtacaaagttagcggtattcggctcactgccgtcggtgatcacctgaatcggtgcggtggcgttggcgcgctccatctgttccgcaaaatccaccggaataaccaccagaccgcgaattttccccgcctgcattttggcgatcagttcctgacggttatcgctgatggtggcgtcgatgtaggggctaccggtcatggtgtgggtgaaatccagcgccgcttcgctacgctgttccagtaaaatcccgacccgcagcttgctggagtcgaggttaatgccgtaaccaaaaataaacagcagtagcagcgggatcactaccgcaatcagccagctactcggatcgcgaacgatctgccgcgtctctttaacgcacagcgcccgtacgcgacgccaggacaggatcgggttactcattgctatgctccttatcccagtcgtggatcaactgaataaaggcttgctccatggtgggatcgggttgctcatcgttagcgctctgtgctttcaaatcgtccggcgtgccgctggcgattaatttcccgcggtacaccaggccgatgcggtcgcaatattccgcttcatccataaagtgggtggtgaccatcaccgtgacgcctttctctaccatgctgttgatgtgcagccaaaattcacggcgggtgagggggtcaacgccggaagtcggttcgtcgagaaacagaatgtccggttcatgcatcaggctacaggccagcgccagccgctgtttaaaacctaatggcagttcatcggtggcgtgggaggcgatacttttcaggccgaacgcctcgctcatgcgggagattttttcgttctgcgcccgaccgcgtaagccatacacaccagagaaaaagcgtaaattctgttcgaccgtcaggttaccgtagaggctaaatttttgcgccatatagccgagatgctggcgcgctttaccggaactctctttcagatccatccccagcaccagcgcctggccggaagtcggcaccagcaaaccgcacatcatcttaaaggtggtgcttttacccgcgccgtttggccccagcaaaccaaaaatctccccacgtttaacggcaaagttgacgtgatcggtggcggcaaaatccccaaatttcttggtcagttctttcgcttcgatcaccgtctcgccgggtgtgccttctaccgtatgtaatattgcgcccagcgggctttcgctggttccggcaccgcccagcaaatcaataaacgcatcttcaaaacgcggcgtagtttcgttgatgttgatttccggcatcccgtcggcatggcgaatatcgtctggtgtggcctcttttttgaggatcagacgtacgcttttcccctgaatcatgccgtcgctgacctgcggcagtttcaaggcgcgttgcaacagtttgcggttgccctcgtgtggactggtcatcagaaagctgcgtccggccatggtttgtgtcagggcttttggttctccctgatacagcaactcgccttcgttcatcagtaacacgtcacggcactgctcggcttcgtcgagatagctggtactccagaggattaacatcccttcgcccgccagctcatgcaccatctgccacagttcgcgccgactgatagggtcaacgccgacgccgggttcatcgagcagcaacactttcggttcgcccaccagggtacaggccagaccgagtttttgtttcatcccaccggagagcttgcccgccaggcgtccggtaaacggcccaagagacgtaaactccagcaggcgagcaaaagtttgcttacgtgcctcgccggtgacgctgcgcaaatccgcgtacagattgaggttctccatcaccgtgagatcttcatacagaccaaatttctgcggcatataaccgagcacggcgtgcagcgcgccgtcgtttttgatcggatcaaagccaatcaccgtggcactgccgctgtcgggtttcagtaatcccgccaacatccgcatcagcgtggttttacctgcaccgtccggccccaccaaccccgtcacataaccggcgtgaatggtacaatcgagcggcgcgacggcgggcttgtccatgcccggaaagcgtttttccaggccgttcagcgtgataacggcatcattcatgtcctgcctcgtcaccgaattgtaccgtcactggcattccctggcgtaacgcatcatcggcgtcggtcaccacaatacgcaggcgatagacgaggtcggtacgcagatccggcgtttcgacggttttcggggtaaattcagcagtcgggctaacgaaaccaatctgcccgtgatacggcttgtccgggcgaccatcggtataaagcagcactttgcgccccggctgggcctggtcaagattacgttcatcaacataagcgcgcacccacaccggacgcgttagactaacggtaaacaccgtgccaccttcattgaggaccgtgcctggctccaccgcgcgcgttaacagcgtgccatcagacggggctatcaacgtactgtcctgtaaattcaactccgcctgcgccagttgcgcctgcgcctgttcgaggctggctttcgcctgagcgatgtcctgttcacggttaccggaacggtactgacgcaatttatcctgtgcacttttcagcgttgcctgcgcctggtcgcggctggagcgggcattttccaggtcatttgcgctaatagtgcggcttttccacaacccttgctggcggttatagaagttctgcgcatagtcataggcggcttgcgcctgtttcaccgctgcggcggcctgagcgatttcttcattgcgatacccggcaagcatcaggtcatactgcgcctgtgccacgctaacacccgctttcgcctgcatcagggcaatctcatacggcttgtgatccagttcgcccagcacctggcccgctttgatagcatcaccttcgtccaccgccaggctttcaacgcgccccccaacacggaaactaagatttaccgtacgaatatccacgttgccatacagcgtcaggccgttatcctggcggctttgataccaccagtagcctccggcaaccacggcggcaagtaccactaccgccaatccgatcacgacaggttttttcatcactacaaactcctttgcgataattacaaactcctttggcttaatccttgcaaaatcaggtcgatatgacaggtcaccgtctggttgatcagttcggtcttttcttcatcgaacgcggtccagccggtacgtaacagaattgtttctttgccaagacggaacgccagaatctcaccaatcaacgcatgggtatgaaggatcatgcgggtgtcattggcgtcgcagccggtccaggcggcaatcaggcgtgtcaggtggctgtgtagcggactaatcacctgttcgtgcaccaggtggtaggctgccgtgggagagagctgctcacgggagataaacttgctgaggttgacggtgtcatcctgggtgagcagcttaatcatgttcctgcaggcgcgaaggatcagttcacggatggcagcccgatcaggctgtggttgcgcgaacaagcgttcggcttcctcggcatgcggacggaactgctcgccaataaaatcggcaatccactgggcgcaggcgaggtacaaatcttctttgctaccgaagtagtaggtgatggcagcgatattctgcccggcctgggcggctatctcgcgagtggtggcgttcattccatattcaccaaactgcgccagtgcggcagcaatcagctgttttttcgcctgttcacccttgattgtcatggcaggattattcatcgcacagtccattcttaatcaaatgattgattaagattatgactccataggggagttgtccagtatggctaagaattttagcaacgccagtcacagggataatttatgcgctgcgtcacaaaaactgctacactccgctccctcatgacattgtggtttttgtcattttccttttcagtatctccctgaaaactacaccggtaacggtcggggcggttcggagtagttatgtctttcgattctttgggtttaagccctgatatcctgcgcgccgttgccgagcagggttaccgtgaacccacccctattcagcagcaggcgatccctgcggtgctggaaggccgcgacctgatggctagcgcccagaccggcaccggcaaaacagcgggctttacgctgccgctgttgcaacacctgatcactcgccagccgcacgccaaagggcgtcgtccggtacgtgcgctcattcttaccccgacccgtgaactggcggcgcagattggcgaaaacgtccgtgattacagcaaatacctgaacattcgtagcctggtggtgtttggtggtgtgagtattaacccgcagatgatgaaactgcgtggcggcgttgatgtgctggtggcaaccccgggacgtttgctggacctggaacatcagaatgcagtgaagctggatcaggttgaaatcctcgtcctcgatgaagctgaccgcatgctcgacatgggctttatccacgatatccgtcgcgtgttaacaaaactacctgcgaagcgccagaacctgttattctccgcgaccttctctgacgatattaaagccctggcggaaaaactgttgcacaacccgctggaaatcgaagtggcacgccgcaataccgcgtctgatcaggtgacccagcacgttcactttgtcgataagaaacgcaaacgcgaattgctgagccacatgattgggaaagggaactggcagcaggtgctggtgtttacccgtaccaaacacggcgctaaccatctggctgaacagctcaataaagatggcatccgtagtgcggcgatccacggcaataaaagccaaggtgcgcgtactcgtgcgctggctgattttaaaagcggcgatattcgtgtactggtggcaactgacatcgctgcgcgcggcctggatattgaagagctgccgcacgtcgtcaactatgaactgccaaacgtacctgaagattatgtccaccgtatcgggcgtaccggtcgtgcggctgctaccggtgaagcgttgagcctggtgtgtgttgatgaacacaaactgctgcgtgatatcgaaaaactgctgaaaaaagagatcccgcgcattgcgattccgggctatgagccggacccgagtatcaaagccgaaccgatccagaacggtcgccagcaacgtggcggcggcggtcgtgggcaaggtggtggtcgcggtcaacagcaaccacgccgtggggaaggtggcgcaaaatctgcaagcgcgaaacctgcagaaaaaccgtctcgccgcctcggcgatgccaaaccggcaggcgaacaacaacgtcgccgccgtccgcgtaaacctgccgctgcgcagtaatcttttatgccgggctatgcccggcatcaggctgatgaacaaacgcaaaactgcctgatgcgctacgcttatcaggcctacgtgaactctgcaatatattgaatttgcatgcttttgtaggccggataaggcgtttacgccgcatccggcatttcacaacaagcacttgtcagcaatttgagaacacgggaaaaaatttatctgttttaccgcccataagccaccgagacgttacttctctatagccaattgttcgcgcaactccattaaaaggtagcccagtcgattcttgcccttaccatgaccaccgtctccccagtaagcatcgttttccgtatgctcaaccagttttgcgggcgcggttgccagcaagagcgcacgcagttctgcatgctgttcgaatttagcgcgaagtgcttttcgcatcacctgttctttgacgctctcccagtttttacgcagaggcttagaacgatcgcgccccatgcgtgcggcgaccataggggaagaaacccgacggatctcttcgcggtatttttcatcaaggaatttttgtgcctgaaaatagtgttcactggtaggccaggttttcccgtcaaccttgatgggccaggcggcaaagttagaaaaatcaccgtagtcatcgctggtgctgtagaaatttatgatggtgtcttgcatgacgtgttggatcctttgtgctcgaacgggcattaaaccgcattatgttggtggttattgcgagccgctttccagaaacagaaaaaccattacccctgaaaaccgaaaaatgccacaatattggctgtttatacagtatttcaggttttctcatggcattaaccgccgcgcttaaagcgcaaattgccgcctggtataaggcgcttcaggaacagatccccgactttattccccgtgcgccgcagcggcagatgattgcggacgtcgccaaaacgctggccggagaagaagggcgacatctggcgattgaagcccccaccggcgttgggaaaacgctctcttatttgattcccggcatcgccattgcccgcgaagagcaaaaaacgctggtggtgagtaccgccaacgtggcattgcaggatcagatttacagcaaagatttaccgctgctgaaaaagatcattcccgatcttaaattcactgccgcttttgggcgtgggcgctacgtttgtccgcgtaatctgacggcgctcgccagtactgaacccacgcaacaggatctgctggcgtttcttgacgacgaactgacgccgaacaatcaggaagagcaaaaacgttgtgcgaagctgaagggcgatctcgatacttataaatgggatggtctgcgcgatcatactgatatcgctatagatgacgatctctggcgtcgtttaagtaccgacaaagccagctgcctcaaccgcaattgttactactatcgtgaatgcccgttttttgtcgctcgtcgggagattcaggaagcggaagtggtggtggcaaaccatgcgctggtgatggcggcgatggaaagcgaagcggtattgcctgacccgaaaaatttactgctggtgctggacgaaggccatcacctgccggatgtggcgcgggatgcgcttgagatgagcgccgaaatcaccgcgccgtggtatcggctacagctggacttgttcacgaaactggtcgctacctgcatggagcagtttcgcccgaagaccatcccaccgctggcgatccctgaacgtttgaatgcgcattgtgaagagttgtatgagcttatcgccagcttaaacaacattctcaatctctacatgcctgccgggcaggaggcagagcaccgttttgcgatgggcgaactgccagatgaagtgctggagatctgccagcggctggcaaaactcaccgagatgctgcgtggcctggcggagttatttcttaacgatttaagtgagaaaaccggcagccatgacattgtacgtctgcatcggttgattttgcagatgaaccgcgcgttggggatgttcgaggcgcaaagcaaactctggcggctggctagcctggcgcaatcttccggtgcaccggtgaccaaatgggcgacgcgggaagagcgcgaagggcagctacacctctggtttcactgcgtgggaatacgtgtcagcgatcagctggaaaggctgctgtggcgcagtattccgcacattattgtcacctccgcaaccttgcgtagcctgaacagttttagccgtttgcaggagatgagtggtctgaaagagaaagcgggcgaccgttttgtggcgctggattccccctttaaccactgcgaacagggcaaaattgttattccccggatgcgcgttgagccttccatcgacaacgaagagcagcatattgccgaaatggcggcctttttccgtaagcaggtggagagcaaaaaacatctcggtatgttggtactgtttgccagcggacgggcgatgcagcgctttctcgactatgtgacggatttacgtctgatgttgctggttcagggcgatcagccgcgttaccgtttagttgaactgcaccgcaaacgcgtcgccaacggtgagcgcagcgtgctggtgggcttacagagttttgccgaagggcttgatttgaaaggtgatctgctcagccaggtgcatatccacaaaatcgcttttccgcccatcgacagcccggtggtgatcaccgaaggggaatggctgaaaagcctcaaccgctatccgtttgaggtgcaaagcctgccgagcgccagctttaacctgattcagcaggttgggcgactgattcgaagccacggttgctggggcgaagtggttatctacgacaaacgcttgctgaccaaaaattatggcaagcgactactggatgcattaccggtatttccgatagagcaaccggaagtccctgaaggtatagttaaaaagaaagaaaaaacgaaatccccacgccgtcggcggcgttaatgatgtgagtcaggtaaggagtcgtaaatggactatcgcaaaatcattaaagagatcgggcgcgggaaaaaccacgcgcgcgatttagaccgggatactgcgcgcggtctgtatgctcatatgctcaatggtgaagtccctgaccttgagttgggcggcgtattgattgcgctgcgtatcaaaggagaaggggaagcagagatgctcggcttttacgaagccatgcaaaatcacaccatcaagctgacgccgccagcaggcaagccgatgccgattgtcatccccagttacaacggcgcgcgtaaacaggccaacctgacgccgttgttggcgattctcctgcacaaactcggttttcctgtggtggttcacggggttagcgaagatccaacccgcgtgctgactgaaaccatttttgaattgatgggtattacgccaacgttgcacggcgggcaggcgcaggcgaagctcgacgaacatcaaccggtgtttatgccagtcggcgcgttttgcccgccgctggaaaaacaactggcgatgcgctggcggatgggcgtgcgtaacagtgcacataccctggcgaaactggcgacgccatttgccgaaggtgaggcgctgcgtctttccagcgttagccatccggaatacattggacgcgtcgcgaagttctttagcgatatcggcgggcgggcgctactaatgcatggtactgaaggtgaagtgtatgctaatccgcagcgctgcccgcagatcaatctcattgaccgtgaagggatgcgggtgctgtatgaaaaacaggacactgctggtagcgagttactgccacaagcaaaagatccggaaaccacggcgcagtggattgagcgttgccttgctggcagcgaaccgattcccgaaagcctgaaaatccagatggcttgctgcctggtggctacgggtgaagcggcaactatcagcgacggcctggcgcgcgttaatcaggcattttaattcttttctcagccggatgagccatgtcatccggcttttaccccaccgcaatatgaaattcctgcatctttattgaccttcccacgcccggcgtgcagcataaaaatacaacaaacacataacataaacaggagttaaccatggaaagtggtcatcgctttgatgctcagacgctgcacagttttattcaggctgtatttcgtcagatgggtagcgaggaacaagaagcgaaattagttgccgatcatttaatcgcggcaaacctggcagggcatgatagtcatggtattggcatgatcccaagctatgtacgctcctggagtcaggggcacctgcaaattaaccatcatgccaaaaccgttaaagaggcgggggcggcggtcacgctcgatggcgatcgcgcatttggtcaggtcgcggcacatgaagcgatggcgctggggattgagaaagcgcatcagcacggtattgccgccgtggcgctacataacagccatcatatcggccgtatcggttactgggcggagcagtgtgcagcggcggggtttgtctctatccactttgttagcgtggtcggtattccaatggtcgcgccgttccacggtcgcgacagccgctttggcaccaatccgttctgtgtggttttccctcgtaaagataatttcccgctgttgcttgattacgccaccagcgccattgcatttggcaaaacccgcgtcgcctggcataaaggcgtccccgtgccgccaggttgcctgattgacgttaacggcgtgccgacgaccaatccggcggtaatgcaggagagcccgttgggtagcctgttgacctttgccgaacataaaggctacgcccttgcagcgatgtgtgaaattcttggcggggcgctttccggcggtaaaacgacgcatcaggaaacgttacaaaccagtcccgatgccattcttaactgcatgaccactatcatcatcaacccggaactcttcggcgcgccggattgtaacgcgcagaccgaagcctttgccgagtgggtgaaagccagcccgcatgatgatgataagccgattttgctaccgggcgagtgggaagtgaacacgcgtcgcgaacggcagaagcaggggattccactggatgcgggaagctggcaggccatttgtgatgcagcgcggcagattggtatgccggaagagacgttgcaggctttctgtcagcagttagccagctaaaaaaaagcccgtccagtggcggacgggcaaacaagggtaacataggatcaatgagggttagagcatatgcgtctgtcggcaaacagacagggaaatacttgtgctggacgtagcgtaaacgcctgatccgtccaacggttcggattttgtaggcctgataagacgcggtagcgtcgcatcaggcatctgttgccggatgcggcgtaaacgccttatccgtcctacgaattacttataaattaccgcagtaccgcttaatttattgttgttggtggcggaagtgatgctgtatccactggcaccggctgccgcggctttctcagccagtttcgcttccagggcatcgagggtggatgcgccatcggcagaaaccacgccgattttattcatgttctgtgcctgggatgccgttaccggttccgccgcgaacacgccaaaactcagagtactaagagccatagcagcaacaacagtattgatagttttcataattaatctctcgcaggtgatttttgtataagtgacgttgtttcgtcgatgtgatgagtatcacgtttttttacgagagataaaatcgaagagaattgaccgccttgttcaaataaattgattgatatctaacctactgataaaccatttatttgttgtacttatgaacttgttttataccgcgtggcagtcacagcagcgttaaaggcacggaatgacacgcaaaatacaaattatactcgctatgcatctcgccagttgtagttaacgtaactggctgtctttgctacctctgcgattatatcctgtataagctggtttttgtaaatctttctcctgctgacaatgaatacataagcgcacgccaggaatggcttcccgacgggcctgcgggatgggggcaccgcactcttcacattcatccaggctttcgccgcgcggaatttcaccccgagcgcgggcaatcgcatcttcaattgtactgttgatctgttcgttgacggcgtcatcgttagcccaaccggatgccatatcgacctccccatatcaatacttgtacagttaagtgtagctaatccagggacgaactcgggcagttcaagcatcagatctcgctccattcccgcagcagattatgataaagattaagcaggctcaggatctcttcactttcgccgtagcggcttttcaggctctgaatattgttgtccagttcaaacagcatggcgcgctttttatcatcgcggatcatgctctggatccacataaaacttgccactcgtacgccgcgggttacgggtgtcacgcaatgcaggctgctggagggatacaacacgagatcgcctgccgggagttttacccgatgttgtccgaaggtgtcattaacgaccagttcgccgccgtcgtagctttgtggatcgcttaaaaacagcgtggcagaaaggtcagtacgcatccagccgttttgtggatggctgcgtactgcgccatccacatggaaaccataggtttcattgttctgatagcgattaaacagcggcgtggaaagggtacgcggcaaggccgcggcaaagaataaagcatgttggttaaccgcgttcagcacctcattttgcagggcggcgtataacgtgctgcgggtgtcgacctgttgattgttcttaacttgcgcaccttgtgcgccggtggtgacgcgtccatccacccattcggcttgttccagttgttcgcgaaaacgagcgacgtcctgtgggcttaacacgccgggaatgtggtacatcatacaatttctccaaaaagtggggcctgcgccccacatctgaatcagaaatgcatattggctgtgagcaagaaggttcttggctcgcccgggtgataacggtagccgctcttgttgatactggcgacgtaatcggtatcaaacaggttgtaaacgtttagctggaagtcgagattgcgattaactcgataccccagtttggcatcggcgacccagtaaccttcggtaaacgctggcgttcccaccgcgccgtcactacctttatgcatactgccgatatagcgtgcgcccgcgccaacagagatatcgtcggttgcctgatattggctccataaggtgaaggcgtgctccggggtatacggcaggctactggaaccatcctgggcaacatctttgccgtttttgatggttgctttttgctgggtatagccgccaatcacctgccacgcgggagtgatattcccggccacggatatctcatagccttcgacgcgtttcttaccgtattggctgtaagttccgtcatcattttgctcaacttcattttcgatatcagtgcggaacagcgcggcggtgagcaacagacgtttatccagaacctgccatttggtgccaatctcgctggtgttggctttttgcggtttaaaatcggtgcggttggcactgttaccgctgccagactgcgcaagggcgaagttgttgccgcccggaggctgctgggaaacggcatagttaatatagacattgccgttttccgtcaggtgatacagcgccccggctttccagttcatcagattgccgctcttggcggtgtcgacggtggtgaccggagaaccttttgccacaccagttgggcaggtgatggcaccgcgtccgctgccgccgcaggcggtggcactgtcatattcagtatgataattatccagacggatcccgccgttcagctcaaaatcacgggtgatttgcagcgtatcaaaggcgtaaattgcgaaggtatccgtctgaccattggcgtttgcgccgttgcgcgtcaggccgccgggatgaatgctgctgtcaggatgataaatatttaccgcgggtaacgtcaccggattaacgccgtagttagtctgcgtttcacgggtaaattccacgccggtactgacatcatgaccgatagaaccggtatagaacgtgctggtcaggttggtctggttggtgagaattttattactcacatctttggtattcgccgtgcgactccaggtccagctattcacatcgctggtgggctgagtaatattgctcgccccgcccataatcgccgtcatcaggtaatcctgctttacgcggctccaacgggtagtattgcgaatggtggtgttatcgttgatgtcgtgctcaaaacgcatggtggcggtgtcggtggtgctatcgtcgtaatcggaatccgtgccgtaaaagttatgagtatcaacttttccggaatgattcagggccgccgttcccgcagatggggcagaatagcccggcaaaccgatggtcggaatgccgccgtctggcgtgttgtgctgggtgacatgcagataattaagatacaaacgattcgctgtaccaaggccaaaagcgacagaaggggcgacgccgtaacgctcatttttgactttgtcgcgtccggcatcgtgcgttttttcgcccattacattcaggcgcaccgcggtggtatcaccaatgacctgattgacgtccagcgtgccgcggcggaaccaggcgctgccaatactggcggaggcgtcaatgccggaatcattgcgcggctgcttgctgatcatattgatgctgcctgtcggtgcgctgcgcccgtagtcggtgccggacggccctttaatcacttcgacctgctcggtattgaaggtgtcgcggctgacgctgccgatatcgcgaatgccatcaatataaatactgttagaggtatcggcaccacgcatataaatggcgtcgccagtggtggagttaccgttctcacccgcaaaaaacgcacccacgccggggacgtttttgagcgcgtcggtaaggttggttgcgccctgatctttaatcacttgttcagaaattaccgtcatcgtgcgggtagtatccgctaccggacggctgaatttcggatcggcagattgttgtggcgcataaaggctaggcgtacttgcttcgacaaccagcgtgtcatccgcgttagtttgcccttcggcggcgagtgcctgagccacaggcgtgatgccaatacaaagaccggcaaagaacgtgaggctatgaaattgtctggcagggaaattgcgattgttttccattttgcaggtgactttttcttatatgttgaaattttcactgccacgagaaagcctctctgcggatgcgatgccactgttaatcccgtgatagtgctcgtgaaagtgataataattttgataagcattatcacttggagcgattttctatcacccattgcgcgaaaaagaaatacatttatttacattgagttcatatttgatgttttttgattacaaaacagacgaaaactgcatccagaggcgaatgcagttacgttggtggggttatttgtagatggttgcagtaccgaacatctggtcatttccgcctgcggaattaatgacataacctttcgcgccttgttcgcgcgctttttctgccagtttatcctccagatcgcttaggttacttgcgccagttgcgctaacggtaccggcgggccgtagctgaccgctgtccaggttactcatcggttgcgcggcataagccgtgagagagattccgctcaggacggtggcaatcagtagtgtgaggcactttttcataatgacatcctcataaatacaacgggtagtgcctgataagtgtaggtcgcctgcgcgatgcaaatgacgcaaaaaattgacagagatgtgcttattttttgaacgatatatttttacaaaataagacaaatcaatgacatgcataatgctgatttttatgatgaattgccataaaccatagccatgttaaggttttggggaatgataaacgcagccagatatttaccctgtcgcgttatgcgggtatcttacgccgctgcttaaaggagaatgctatgtccgcccagaaaccggggttgcatccgcgcaaccgtcatcacagccgctacgatctcgccacgctttgtcaggtcaatcctgaactcaggcaattcctcacgcttacacccgccggggagcaaagcgtagactttgccaatccgctggcggtgaaggcgctcaataaggcgttgctggcccatttttacgccgtagcgaactgggatatccccgacggttttctctgcccaccagtaccgggccgggcggattatattcatcaccttgccgatttactggcagaagcaagcggaacaattccagcgaatgccagcattctggatatcggcgttggtgcgaactgtatttatccgctgattggcgtacatgaatatggctggcgttttaccggtagtgaaaccagcagccaggcgttaagcagtgcgcaggcgattatcagttctaatccggggcttaaccgcgccattcgtctgcgtcggcaaaaagagagtggggcgatttttaacggcatcatccataaaaacgagcaatacgacgcgaccttgtgtaacccgccattccacgattccgccgctgcggcacgggcaggtagtgagcgtaaacgccgtaacctggggctgaacaaagacgatgcactgaactttggcggccagcaacaggagttgtggtgtgaaggcggtgaagtcacctttatcaaaaagatgattgaagagagcaaaggcttcgcgaagcaggtgatgtggtttacaagtctggtatctcgtggtgaaaacttaccgccgttgtatcgtgccctgacggacgtgggcgcggtgaaggtggttaaaaaagagatggcccaggggcaaaagcagagtcgctttattgcctggacctttatgaacgacgagcagcgccgccgttttgtcaatcgccagcgttaaagcgttggttcccccggcggtaacggttcagccggggtcgcgcccggagcaggcagcacctgataagtctgcactggcgcgcgaacgcccgccaggtcgaaatgttttttcacctggctgtcgagggcaaagcgtaccgtccactgtttgagtggcagcgtggtgaagctaacacgcagtgtaaacgcggtattgcttaagccgacaatcccggcaaaattcggttcaccaataatcagcccgcgaatttcttcgttttccattaattccgctaccgcatctttcagtgcctgattggctttatcagcatcttcatggcgatcaacatcataatttgccaccacgctaccaatgccgcggacaaagttagcaaaggtggttatgctagaccacggaatgatgtgatacgccccggtatcctgtcgtacgcccacggagcgaatgctcatccgttccactgtgccggtcaacggcccgatagtcaccaaatctccagtgttcatgccgttttcaaactgaataaataccccggtgataatatctttcaccagcgtttggctaccaaagctgatagccagacctaatgccccggcacctgccagcaatggcgcgatattgacgccgatttcgctcaacacaatcatgatggtgatggtactgataatcaccgccagcgcgttacgaaacagcgtaagcagggtacgcgtgcgggcgctgggtagcgggcggccatgaatatcgctagccagccggttttcgatcaaactggcgagcaccgtccagccaaccgcgctgaagaaaagaatgagtgcgatacggatcaggatatctacggttttctgccccgcgccgttttgcagccagttccagaaatcgaacaatccccatgcgctcaacagcaacattaccgccacgcagactgtcagaatacgcgccgttttcagcgccgcgctcagccagccattcaaccgtttttgcagctccggatagttacgctgagtatgtgggctgagagtgatggttttcgccagccagcgggaaaacataccggaaacaaacgctgcgataccaataatcgccaggctgcgcaccgttgcacccatcataaatttcaggctgttgcccggatcgaacaagctaaagaaaaacagcacgataaaataggcgcttgccagccagtgccacaccagcgcaaaggcgcggataaacaggctgaaaaaggccaggctatgctccgcgaagttgagcaaatgctgggtaatctcttttttattacgaaagatcaggtacaacgcccagacggtcatgcacagcataatgatgacgttcgccagcgcacctatctgtacattcacctgattagagataatcggcacggccacaatcaggccataacctatcaaactgcttaaccagctcaggcgacgactccagtaacgggcgctctcgtcctgaatcgtgaacgggcgcagctccgccacgtttgggcaaaaaatcaggcgtagtacggctttgaaaaattcaatgagggcaaaggcgttgagaaacaaactttgttggaaagcgatggtgcgactgcctgcattcaggttgtcgcttaatacctggccgacaaataatgtcagggccagtaacagcaggtcgataataaacgccccgataatcatcgccggaagctgcaaccagttactgcgctcacgatttttttgccgcgcccactgacccattttgcgatacagcggcagtgcgcacaggcgaatcagccagtaaaaaccaaacactaataccgctaacatactaaaatgggtcagcgcattgctgaaggtttgtggattaaacggcttatgcggggagccggtgatattgcgataaagttgcccgaagcgggcggaaagggcttcaccataatggcggctgacttcggtgaccttttgcagcacggtttgctcttcgaccagcgtcggcggcactatttttggtaccggttcagcagggggcgtagcggcaacggtgcgcaactggtcgatcaactctttacggctggtgtcattatccagcacatccgccagtgcgccataggccgcttttttttgttcgatatccggttccggggccggttcagtcgtactgtccgttgtcgttgtggttgtaacgccgggtatggataccgcgtgggcaggtgcgcccagcaggcagaagaggatgaacaggatccaccgcatgactcctccagtgagaaaatagagcaaaaagataagtatagatgctggaggaggggcgattttaaatgagaggaatctggtgtgcctccctttcgggtgaaagggaggaagggatattaagcaggttgctgacaacgtgcgggcttttttgccggatgcggcgtgaacgccttatccgtcctacaagttcatgcaattttaataagttgccagatatcctgtaggcctgataagcgtagcgcatcaggcaatgtgtcttattaagagacgtgctgcaaaaattcctgcaagcgctggctcggcgggttcttgatcaacacctgcggattgccatcttccgcaatccggcctttgtcgataaagatcagccggctagctactttctcggcaaaaccgatttcgtgggtcacgatcaccatcgtcatcccttcttcagccagatcctgcataaccttcagcacttcatggcgcagttccgggtcaagagcggaagtcggttcatcaaacagcatcattttcggcttcaccgccagcgcgcgggcaatcgccacacgctgctgttgaccaccagaaagttcggaagggtagtgatgtgcacgttctgccagaccgactttcgccagcagctcacgtgccagtttttccgcctcttctttgttcgcgccacgcacgcgtagcgggccaaacatgacgttttccagcgctgtcagatgcgggaagaggtaaaactgctggaacaccatacctgcttcctggcgaatcaggcgctcgtcaactttcggatcgttaaccttcaggccatcgacaatcagatcgccggaggtgatttcttccagtttgttgatgcagcgcagcagggtgcttttaccggaaccggacggcccgataatcaccacgacttcgccctgggcaatgttcaaatcgatattgtgcagcacctgggttgggccaaagtgcttggagacgtttttaaattcaatcacaggattttcatccttctttccagacgacgcagaataaagctcagcaccagggtaataatcagatagaacaccgccacggcgctccagatctcaagggcgcggaagttaccggcaataatttcttgcccctgacgggtcagttccgccacgccgatcacaataaacaggctggtgtctttaatgctgatgatccactggttacccagcggcggcagcatacgacgcagtgccagcggtaaaatgacgtagcgaatggtttcccaacgactaagaccgagcgccagtcctgcttcacgaaaacctttgtggatagacagcaccgcaccacgcgtgatttccgcaatatacgcgccggagttgatcatgatggtgaccaccgccgcagtaaatgggtcgatgcgtaagtcgttaaacgccatcggcagggcgaaataaataaacatcacctggacgacgataggtgtgccgcggatcacttcaataaagaccagcgcgacgtggttggctatccaacctccgaaggtgcgtgcaaaacctgccagcaatccgattaccagaccgcctgccagaccgaggacgctaatccacagggtcattttggcaccttcaatcagaagcggaatggcaggccagatggcactccagtcaaactgcatatgttgttcctgttaccgtggtgtaaataatcaaattcagggtaattaatggccccggagcgggtttgcgcccctcaccctaatcctctccccataggggagagggaactgccagtgcgttttacaggtgtagcgttattatttcggttcagtaccgaaccattttttgtagatttcgttgtaagttccgttctcgcgcagggttttcaacgcgccgttgactttgtcacgcagctcgtcgctacctttcgggaacgcaataccgtattgctgcgcttccagagagtcacctaccgctttgaactgaccgttaccggcggttttgatgaagtacagaatgtttggcgtatcgtgcagaacggcgtctgcgcggttggtgcccagttccatataggcgttatcgatgttcgggaactgacgcagatctttagttttgatgtttgctttcgcgtaatcaacggagccagtaccgctcttcacagcaaccactttcccgtcgagatctttcacgcttttcacatcgttattgttagctttcaccatcactaacaggccgcttttgtagtagccgtcagagaaatcgatcgcttttttacgctcgtcggtgatggtaatgcccgccagcgccagatcgacgtttttggtttgcagtgccggaatgatcccactgaaatccatcggcttcagttcgtaatccagcttcagctctttagcgatggcagcccacagatcaacgtcaaagcccacatatttatcgccctgtttaaattcaaacggaacgaaggcggtatccgtcgcgacaactaattttttatccgcggcatgagaagaaaccgcaaaagccagggtcagtgcagccagactaacttttaatacagacttcatagcatttccttttttctatccacgggacgatcccctgcgtgacattcacatatatgaaaaaatcgtgccagttttgcaactccttgatttttcgagatgcggcaaaaacgtgatgcacgatttatagggcaataccctgaagatgcaccattctggggcaccaatctggtgcgctaaaattgtgcactcaacacagtgattatttagcgtaaaacctgatgaaaaaacaatctttatgtaacgattgtgtgatgatgtggatacaaaaaatttacttaatcagctggagatagcagatggatgcactaaataagtgcgttgaggtgggctgcaaaacaaaacggcctcctgtcaggaagccgcttttatcgggtactaaagttctgcaccatcagcgatggatttattcgatgttagactcgataaaccacaggaatttatccaggtcgcgagacgcggcggtcaggatatctgcggtgtcgtcatctttcgcttcgccaatcgctttgcgtacgtcattagcgacgattgcgtaacggtcagccagttctttcaggtgatcctgaacgttgtggatgtccagcgggtaacttttcagcggggttttgctgttgataacttgagtggtccccagagctacaccgcccagctgcactgcacgttctgccatggtatccagatgatcgatcagtgcggtgcggaagccatccagcatttcatgtacggcaatgaagttagcgccgcgcatgttccagtgcgcttgtttggtaatcaaagaaagatcaataaactggataacctggcgattcagcaactctactgttgcttttttctcgctgtcggagacatcgttgcgggtataaagcagattggtcgctttacttttaactaatttagcggtactcataatttcatatcctcttgatgttatgtcccagtaattaacgagattaagtatagcaccggctatgtgttccgctattctggctgttcctatcacactaatagtggtaacaagcgtgaaaaacaaaactaataaagattcaatgagttagatatattgataagaacaattcttatttatctgctcgccaggaattttcggaataaatatgcttttgcataattcgatatataaagacggtgtagaggaaaagtagcgagaaattctgcatggttatgcataaccatgcagaaatgtaaatttaattaatgtctaattcttttattttgctctctttgcgtactgtcagcgtagaccccatactagcggcgatgatagcgccgagcgccagtagctgtatgggtgtcagtgtttctccgaggaaaatcatcccggaaacggcagccagcgccggttccatgctcatcagcgtaccaaatgtccgtgttggcaaacgggtgagggcaatcatttccaggctataaggcagagcggtgctgagaatagcgacagccagacccaatggaataacgctccagtgccagagtgcttcaccagcctgaagcgctccaattggcacgaaaattaacgctgcaatcaagctaccaattgccaccgtcgcagggccatgttccgctcctgcgcgttgcccacttaaaatgtaaatagcccaacaagccccggcccccagtgccagcgcacagccggttaaatcgacatgggaaacgtcttgccccagcggtagcaggaaccacagaccaagaaccgccagcacaacccagacgaaatctaccgggcgacgagaagagaacagcgccaccgccagtggtccggtgaactccagcgccaccgcaatacccagcggtactgtctgaatagaaagataaaaaagataattcatcccacccaggctaacgccgtaaaacaacagcggtaaccgttgctctttggcaaagcgcagtcgccatggcttaaagaacgcgatgaggatcagcgttcctaatgccagacgcagcgcagtgacacccggtgcgcccaccagaggaaaaagactcttagctaagctggctccaccctgaatagacgccatggcaacgagcaatatgactattggtaaccagaccggcattttacgtaaactaccaggcatcctttctcccacaaatatctagacttaagtaaagcgtggagtgtactggatatacccaatgctggttgagcatttgttgaaaaaattttcccccgttttgactaaaatgcgccaggattgatggaatcattagtctggtgattaggaataatctggatgaatgacagggaaaacatgcgtaatacttacgcagttctctgaaaaagtgatttaaatttagatggatagcggtgtatggaaacgttctgttacatgaaatggcccgttagacatcacaaatcgcgaagagtttcccattaatttttgatatatttaaaacttaggacttatttgaatcacatttgaggtggttatgaaaaaaattgcatgtcttagtgcactggccgcagttctggctttcaccgcaggtacttccgtagctgcgacttctactgtaactggcggttacgcacagagcgacgctcagggccaaatgaacaaaatgggcggtttcaacctgaaataccgctatgaagaagacaacagcccgctgggtgtgatcggttctttcacttacaccgagaaaagccgtactgcaagctctggtgactacaacaaaaaccagtactacggcatcactgctggtccggcttaccgcattaacgactgggcaagcatctacggtgtagtgggtgtgggttatggtaaattccagaccactgaatacccgacctacaaacacgacaccagcgactacggtttctcctacggtgcgggtctgcagttcaacccgatggaaaacgttgctctggacttctcttacgagcagagccgtattcgtagcgttgacgtaggcacctggattgccggtgttggttaccgcttctaatcactttggtgatataaaaaatccgcctctcggggcggatttttgtttttaaggtttcgggtcgaaaatatcggttccgagatggttgtaatccaccttctgtaactggaagttggtgatgtatatcggcccggctttcttctcagatataaacgggtatttgatgttaatttccttcgctttaatccccgtccactgggagaaaaagcctaagaagtcattggcactgcggcgggctttaatcacacgatgcgctttatcgtcgctggaaatgaccataaaaggcacctggaaattttgctgatatttatcatcatgggcaaggtattgcacgtctttaccgcgctctttaaaggccagaccgtggtcagaaaagtaaaccaggctgaagctgctgccgctgttgcgtaactgatcgtacagcttgcgcagtaaatcgtccgtttgcgtcatggtatagagatagcagctcgtttctttgctttgcacaaaggtttcgtattttccttgtgtcctgtcgcaggcctgcggatgactgcccatcagatgtagaacaatcagctgcggttggctgtgctcttgcgccagcacttgagcggtcatatccagtaacgcttcgtctttggtgtttttatctgcttcaaaattaccttctttcaggaagtacacttcatctgctcgtttggcgatgctggcgatagcggtatcgtattcgccgatttgaccctggttggaaaaccaccaggtctggaagcccgcgcgatttgccagggtgacaaagttatcctgaaactgtggtttgccatcgacaacgcgattgagcgttaagccaaggcttttctgcgtggagccactggcggcaatgtagtcagcaaatatcaaaccgttaacgctgctggcaaacggggtattgtcccagtgaccgccaaaggcaccgagggcatcgcgacgcgcgctttcaccgatcaccaccacataggtctgatacttcggcttaacggcagtgaccgtccaggtatctttcattccggaaagttttgccatccgttcttgctcttcaatcacctcgttattattgacgatgacatccttagcaaaacgaaataccggatagccagtatctttcagtttaaatacgccaccccaggccaggttttgcacgggagcaacaaaaaatgtcgccacactgaataccagacacaggctgtcgaaggtattccagcgcgctttttcattctctttttttcgcctgattgctattacgccgagcgcaaaaataaataagccgaccaggtagctgtaccacggaaaaatcgtcaggatttcggtgctctcttccatattggtggagtgcaatgccagcaatgtattgaaattaggcgcgccgtaggcctgagcaaaagggaaataacaagccgccaccaggctactgacaccgaccagaactttttgtacgcgaggcaatgttcgccatagcaaaagcaaaatagccgtaaacgcagcggtgtagagcaaactgaaggggtaacctaagccgaggttaattaataggctctgtaaaaagtagaacgcagtccacgggctaaatacccggctacgggtaacaaggctttctttgagggttaaattcatatgccactatcgtaacaaacgccatgtgcttaccctggcgtcaagggtcaatacctgcaagagtgcgtgaagagtggaaaggggtccgcatccgcgagccgcaatatacgcagggctgcaagaagatagagcgagccgccgtagtggtcaactactgacgaacaaatcttttgcgaaggggattgcaaatccgacaaaaagtggggtttttcagaccaaaacgcgttatgcctgcatgaaagcaggagtgaagcggcgtaccgcgacgccgctatttatcggaaggtttatcttgctgcggtttgttgttgaccatatcgcacaacatagagagcagcattaaccgtactttaaagggagaatgactaaacacgcgcatacacctcttgaactcattcataagacctcctgacttgctaatcccgtcgatccttgaggggtgattgcattacatacagatatagcacaggctatattatatagctattgctaaaacgttaattttttgtaccttcgcaactctggtttacaatgtgcgcacgaaatgagaacgctatgtatgcgtcaccataatgaggaagcacaatgagtcgtcgcgcaggtacgccaacagcaaaaaaagtgacgcagttagtgaacgtggaagagcacgttgaagggttccgccaggtcagagaggcgcatcggcgcgagcttattgatgattacgttgagctgatttctgacttgatcagggaagtgggggaagctcgtcaggtggacatggctgctcgtctgggagttagccaaccgacggtggctaaaatgcttaagcggctggcaaccatggggctgattgaaatgatcccctggcgtggcgtgtttttaacggcagaaggagagaagctggcgcaggaaagccgcgagcgacatcagatagtcgaaaatttcttgttggtgttgggcgtcagtccggaaatcgcccgtcgcgacgcggaaggcatggagcaccatgttagtgaagagacgctcgacgcttttcgtttgtttacccagaaacacggtgccaaatgagcctgccttttttacgcacgctgcaaggcgatcgtttttttcagttattaattcttgttggtatcggattaagctttttcgtgccctttgcaccgaaatcctggcctgctgctatcgactggcacaccatcatcaccttaagcggcctgatgctgctgaccaaaggtgtggagttaagcggttattttgatgtgctggggcgcaaaatggtgcgccgctttgctacggagcgtcggctggcgatgtttatggtgctggcggcggcgctgctttctacctttctgaccaacgatgtcgcgctgtttattgttgttccgctgactatcacgctaaaaagactgtgtgagatcccggttaatcggctgattatttttgaggcgctggcagtcaacgctggtagcctactgacgccaattggcaacccgcaaaatattcttatctggggacgttctggtcttagctttgccggatttattgcccaaatggcaccgctggctggcgcaatgatgctgacgctcctgctcctgtgctggtgttgtttccctggaaaggcgatgcaataccatacgggggtgcaaacaccggagtggaaaccgcggctggtgtggagttgtctggggctgtatatcgtctttctgacggcgctggagttcaaacaagagctgtggggactggtgattgtggcggcaggctttgcgctgctggcacgtcgcgtggtgctcagtgtggactggacgctgctgctggtgtttatggcgatgtttatcgacgtccatttactgacccagcttccagcgttgcaaggcgtgttgggtaacgtgagtcatctatctgaacccgggttatggttaacggcaatcggtttaagccaggtgatcagtaacgtgccgagtaccatattgttgctgaactatgtgccgccgtctttattactggtatgggcggtaaacgtaggtggctttgggttattacccggaagcctggcaaatttgattgcgctacgtatggcgaacgatcgccgcatctggtggcgtttccatctctatagtataccgatgctgttgtgggcggcgttggtgggatatgttttgttagttatactcccggccaactaaggtctggcaaataaaaaaggcggattatgagtccgccttttgctttaagttttgaagattaattcagacgaaccggcatcccggagcggtttttaatcgcttcatcaagaacaacctggtcaacatctggctgaccggtcactgtctgcacgctcttcgtcagggtaattggcacaatttcctgaccttcaaactgggcttcggtggtagacagcgggttatggacttcaatataacggctgccgtctggctcggtggtcgcttttaccggctcatcaataaactgtacgcgggtaccgaccggtactttctcgaacaggaatttgatgtcttcgttacgcagacgcacacaaccatgacttacacgcaggccgataccgaagttggcgttggtgccatggatagcatacaggcgaccgatatagagtgcatacagccccatcgggttatccggacctgccggaacgacagccggaagcggttcgcccgcagcgcggtactctgcgtgcattttggcggtcggcgtccaggtcgggcctgcttttttacgctcaactttggtggtccagttgataggcgtatctttgcctaactgaccaatgccgatcggcagcacgataacggtgttggtccctttcggatagtaataaagacgcatctcagcactgttaatgacgatgccttcatgaacggtatccggcaggatcagctgctgcggaatgttcagtacagtaccgcctttcggcaggaaggtatccacacccgggttcgcttccatcatattggaaagccccatctggtactcggcggcaaaatactccagcggctgagtgttaccttcaggaatggtgatcacctgattctgaccaaccaggcgactcccgtcggttggcagaggataagttaccgcagaggcggtactgcaaaagccgacaacagcgaaggccgctgcgaataatgttttcaatttcatattcatgttaagcgagattttgtgcctggcaggccattgggttgagaatattagagtattggaagcgcattataagttcattccagctcacagtgaaatcagatgtgtacgaaatcacattttttgcctttggcttgagtgtagaccttaagcgaggagcaggatcttctttcagacttatggcataatgcgcggtttgtcatatctcttttcaggatacgcctgtgttagtttccagtaacgtcaccatgcagttcggcagtaagccgttgtttgaaaacatttccgtcaaatttggcggcggcaaccgttacggcctgattggcgcgaacggtagtggtaaatccacctttatgaagatcctcggcggcgaccttgagccgacgctgggtaacgtttccctcgatcccaacgagcgcattggtaaactgcgtcaggatcagtttgcctttgaagagttcactgtgctggatacggtgatcatggggcataaagagttgtgggaagtgaagcaggagcgcgaccgcatctatgctttgccggaaatgagtgaagaagacggctataaagtggccgatctggaagttaaatacggcgaaatggacggttactctgcggaagctcgcgccggtgaactgttgcttggcgtgggaattccagtggaacagcactacggcccgatgagtgaagttgctcctggctggaagctgcgtgtgcttctggcgcaggcgctgtttgctgatccggatattctcctgctcgacgaaccgaccaacaacctcgacatcgacaccattcgctggctggaacaggtgctgaacgagcgtgacagcaccatgatcatcatcagccacgaccgtcacttccttaacatggtctgtacccacatggcggatctggattacggcgagctgcgcgtttatccgggtaactacgatgagtacatgacggcggcgacccaggcgcgtgaacgtctgctggccgataacgccaagaagaaagcgcagattgctgagttgcaatctttcgttagccgctttagcgccaacgccagcaaatctcgccaggcaactagccgcgcgcgccagattgataaaatcaaactggaagaggtgaaagcctccagccgtcagaacccgttcatccgttttgaacaggataagaaactgttccgtaacgcgctggaagtggaaggtctgaccaaagggtttgataacggtccgctgtttaaaaatctcaacctgctgctggaagtgggtgaaaaactggcggtactgggtaccaacggcgtcggtaaaagtacgctgctgaaaacgctggtgggcgatctgcaaccggacagcggcaccgtaaaatggtctgagaacgcgcgcattggttactatgctcaggaccacgaatatgagtttgaaaatgatctgaccgtgttcgaatggatgagccagtggaagcaggaaggcgatgacgagcaggcggtacgcagtattctcggtcgtttgctgttcagccaggacgacatcaaaaagccagctaaagtgctttccggtggggaaaaagggcggatgctgtttggtaagttaatgatgcagaagccgaacattctgatcatggacgaaccgaccaaccacctggatatggaatccattgagagcctgaacatggcactggaactgtatcagggcacgctgatctttgttagtcacgaccgtgagttcgtaagctccctggcgacccgcattctggaaatcaccccggaacgcgtgatcgactttagcggtaattacgaagattacctgcgtagtaaagggatcgagtaagtgattatccgtcaccccgatactgtcggggtgacggcggctgatgacaaatgcaaaatagcctgatgcgctacgcttatcaggcctacgcagtacctgcaatatattgaatctgcaggactttgtaggccggataaggcgttaacgccgcatcaggcattaacaaagcgcatttgtcagcaatctgagtaacgtcgaatcgattttcttaatcccacatcaattcacttccattaattctcaaacatccatgcccaacgctcgcttaccgtgaatgttgaggtcggcaagcgtaaagcgtccttcccagtttgtttcatagtcctcgcgcgggaagtcgcccgggcttgcgcctttttccagtgcggccttcaccttgtgcgcgtaggcaagatttttctcgcacatcggtgccgcaggaatgtacatcacgttgccccaaccttgttgattttcaacgggggcaacggaatggatgacgtcgcagtgccaccagacggagtctccggcttcgagttttggaatgctggttaacgcctcaatcaacagtggatgccattgctcacttaccggcaatactcttccgggcgctacgccgcacagttcatcctccggcacatcatcaagcagcggacgtaacagtacgtacgccatagcttcaggaatgggcacgacgtgcagcagcccctgaccaggcagcatatcagagagcgctgtccagccctggaatgtccgaaacacggaacatttggtggtgttgtccaccgtgtactcttcaacttccgtacgatgtgccgcatgccagggatcatattgcgccagattgccattaaagacgttggcgaaaacgcgctgatacgctggaagcagccagcgttccagtgccccggagtcggtatgcgctccaagacctttggaggtcgttccgggcggacggcggcggatacggtcagggtagatgacgctcacatccgggttaaaccattgctttccatcactttcaaatgtccacagacgattgagaaagctctgcgcattcgccatttcttcactctggcgggcctgcatttgcgcctggctccagtagatggggtaaatctcgggacgactagcgctgagcgtcccgaagaaattatcgccggggcctttgtagacctcgtcaaagcggttgcggtccagatagtccagcatgctctgatcccagcctagcgcttgttcgcgggggaaatggccttttatcaccgcacaaccgcgacgtttaatctgttcgcgctgctctgcagtaacatgacctgctttgatatcggcataagacagcaccggccagacggcatcgccctgtgctttgagtgcgttgatttcagccactcgcgtggcaatgtcatcgcttagctgattaaagatctgctggacgtcgccaagctgcgcccgcagcgcgtgcttcatctgacggatagctgctttgtgatcggcaggcaatgtgtcgctggtaaaagtagaagccataaccacctctcattaactttcattcgaaaccattctgatttgcatgtgacaatataagttataaataagttaatgcaagtttaatgatttgatgtgatgtacaggatgtaaaaagaagggaaaaccggagcgcacggctccggtagagaggtcagctgttaaaaggggatgtgttatccagcaccgcctgaatcacattcagcgcgccttcatgattattatcatcggtagcgtaacgggcgatttgtttaatgttttccgcagcattgcccatcgcaaaggaataacgcgccattttcagcatctccgcatcgttaccgctgtcgccaatcgctaccacattttgcggactcagatcccagcgtttcagtaaccggctaataccgtttgctttatgtagaccgggaataatcaggtcgataaagccaaaaccactggtaacgggtttcataatgccatcgagcgctacgtgcagtttgtcgatcactaacgggatttgttcatccggcaggttgaggctaaacttgaacagtacgtcgtcaatctcctgataatcttttacaggtttcaggcgatggtagtgttttgccatcagtgcgacaaatgcttcgggggcattttcgctgacatatgcactttgcagaccgcaggcgacaaaattgagttgcttatcttttagcaactcgccaataacaatccggctttcatgtcgggtcagttcgccgtggaacaactgcttgccatgttcgtaaaccagtgcgccgttttccgcgacaaaagagatctcatcctttagctcaggaaagaaactaataagctggtaatactgattaccgctggcaacaacgaacttaatgccgcgctttttcagttcctgatattgcgccataaaacgtggttggttgtacgttttggcgtcgttaagaaaagtaccgtccatgtctgtgacgataacttttacgctcataggtgtgctcctggctcgaaaatgaaaccgtaacagtgtaataacaatgtgacgcagagcacaaattatatttcgaatgaaagtaaggatgaaattgatgatgtgaatgatttagcccggcgacgacgccgccgggccgaggagattacagcatatgttcagtacgggcgatgatatcgtcctgagcgtctggagagagcgcggtgaagaacgcggaatagcccgcgacacgcactaccagatcgcgatactgatcgggatgttttttcgcatccagcagcgtttcgcgggaaacgatgttgtactgaatatgccagcctttatgcacttcaaagaaggtacgcagcaggatcatcagtttctgcttgtcagattcgttctccagcgttgccggattcagtttctggttgagcaacacgccgccgagaatcgctgccgtaggcagtttacccacactgccaatgaccgcagtagggccaagatggtcagtaccggaggccgggcttgcgccttctgccagcggggtgtgggctttacgcccgtccggtgttgccatagtctgcgcgccaaacggtacgttagcggagatactactcgtacccgcgtaatagttgccgccaaccggaccacgaccgtagcgcggattatggtactgtttcagttcgtcgatataggtctgataagcgcgagccagcagcgtatcgacagtatcatcgtcgttgccgtacttcggcgcaccgttaatcagccgctgacgcagctgctcgtgagtcaggccgtcgaagtcatctgccagtgcggcagcaagctgttgctgaccaatcgcaccttgttcaaacaccagtttcttcactgccgccaggctgttgccgaggttggcaatgccgacctgcaggccagaaacccagtcatatttcgcgccgccttgcttgatacttttcgctcgctcaatacagtcatccaccagcgcgctgcagagaatatcgtgcacgttctcttccagcatggtgtcgacgacatattcgatttcgatacttttgcgggtgtagtaacggatttgcgtatcccacgcgtccatcacttcatcgaagttgttgaagttacctgcgctcaacgctttttcttgtggcaggaacactttgccgctggtggcatcatgcccgccttccagcgccgccagcatcacgcgggcgaagttgataaagctcatgccggtacagcgatagccccatttgccaccgacggcggtttctatacaaccaatcgctgcgtagtcataagcgtcctgcggttcaataccgagtttaataaattccgggatcacgatttcgtcgttgttgaacgccggcatcccgaagccgcaacggatcacctgtacgcaggcgtcgaggaaatcgttgctcattcctgcatggtaacgcacgctgaggttaggctgagtggaacgcaggcgaccgcaggattcgaggatcgcgtaagagagtggattcaccgcgtccattggttgaccatcaaccagattttgcccgccaatagtgacgttctgatacagcggacttcccgcagaggctttactgtgactgccggagcggatcttgttcacttccagcagtttcagccagcagctatgcagcatctcgatggcgtgttcgcgatccagcgtctggttgagttcaacgtcgcggcgatagtacgggtagagatactggtccatacgaccaaagcttacactgtgaccgttagattcgatctgcaaaatcaactggatgaagtaacacagttgcagcgcctgccagaaagtctgcggcggctggtgggcgataagatcgcagttttctgccatcgccagcagttcatcgcgacggctttcgcgggtttcggtcgcggccatttcacgcgccagggcagcgaaacgttcaatgtgttcactgactgccaccagcacgatatcaatcgctttcaggaattgctcaccgtgtaaatcttccagcaccgtcaggttgatgcggctgcgacgttccgctacttcctcgcgcagaccatcaagccctttttccagcagcagcgggaaattcaccgccaggtgcgcatcgccggaggtcatattgccttccgctttaatgattccggtcgccagcagacctttttgctcatcggtaaacatgccgtagcagcgatcctgtacggtctgaccgcgccaccacgggcacacttcatgcagaacgcgtttgttctcttcgctcaccgcaaagccagcaccgggacgatctgccagatcatcaatctctttttcgatccagctgacagtatattccgggaagatcggcgcggcgcgaacttcgcttgcctggttgccaatgatcaactcatcgtgtttgatccagatggtgcgattcgccaggtgatgcgccagtgccagcgcgcgacgtaccgggatcggcttatcgagatgttgttgatacatctcggtatagtgctgcgcgcgctcggtacagactggcggtttcacaatatgcaccagcgcatttttgtgcgctttaatgcggtcgctgagcgtgtccagtttcagtgtggtcatggttgttatcctcgtaaggtcgcggttaaccctttctggcaggcatactgctgggcaaagtcgagcagttctggcgcatcaagcggtttttccggggcgtcatagggcagattaagtaagtgatatttgttgatgcccagcgtgtggtagggcagaaaatgaatttcgccaacgtgcagctcgtcggcggcaaaatcggtaatggcttttacagaggtttcgtcggcattaaagccctgaatcagcggcacgcggataatgatttttttgcccgctgcggcgagttttttcaggttatccagcactctggcggcgttaccgtcggtccactgtttaaacggcgcgtcggcaacgtgttttaaatcggcaagaaacagatcgatatagggcagagaaggggcgatatatttccacggcacatgcagacaggtttctaccgcagtatgaatgcctgcctcgtggctggcttgcagtagcgccatcgccatttccggctgcataaagggctcaccaccgctaagcgttaaaccgccgccgctgcgatcgtaaaacggtttatcgcgcagaacggtcgtcatgatctcctcaacgcttttcacttcaccacacacggttaatgcctgtgtcggacagcagtcggttaacgccgtcagatgctccggggttaacttttcccgatgaataagcaaaccattcagcgcgcgctcaatcacttccggcgcggccttagcgcacagctcgcagccttccagacacagtcgtgcgtcatacagcagatcctgcgtgcgggcgcggctttccgggttctgacaccagcggcagcccaggctacagcctttaagaaatacgaccgtgcggataccggggccatcatgggtgctgtagcgctgaatattgaaaatcatagttgcctctctatttcgttcaagcattaaaatactttcgaatgaaagttagattgatgtgcgtcaactgttcagagagttttcccgtgatagtctacattcagacaaaaagtacattttgaggatggttatggaactgtatctggatactagtgacgttgttgcggtgaaggcgctgagtcgtatttttccgctggcgggtgtgaccactaacccaagcattatcgccgcgggtaaaaaaccgctggatgttgtgcttccgcaacttcatgaagcgatgggcggtcaggggcgtctgtttgcccaggtaatggctaccactgccgaagggatggttaatgacgcgcttaagctgcgttctattattgcggatatcgtggtgaaagttccggtgaccgccgaggggctggcagctattaagatgttaaaagcggaagggattccgacgctgggaaccgcggtatatggcgcagcacaagggctgctgagcgcgctggcaggtgcggaatatgttgcgccttacgttaatcgtattgatgctcagggcggtagcggcattcagactgtgaccgacttacaccagttattgaaaatgcatgcgccgcaggcgaaagtgctggcagcgagtttcaaaaccccgcgtcaggcgctggactgcttactggcaggatgtgaaagtattactctgccactggatgtggcacaacagatgattagctatccggcggttgatgccgctgtggcgaagtttgagcaggactggcagggagcgtttggcagaacgagcatttaaccggacgttctgcatcctcataaattgctgatgacgtggcggagtgccgcgtcttatcaggcctggaggtggcaattactgcccacacacctcacaccccggattacgcatcagtttcatttcgcgaaactgacaggtcatcgcatcgtacatgacgattttcccgctggccggtttgccataacctgccagcattttgatcgcttccattgcctgcaagctaccaattacgccgatcaacggtgccattacgcctgcttccacgcaggttaatgcattttcaccaaacaaacggctaaggcagcgatagcacggttcaccgtcctgataagtaaagacggtgatttgaccttccatacgaattgccgcgccggaaaccagcggtaccttcgcggcaaaacagcctgcgttcagttgattacgtaccgcaacgttatccgtacagtcgagcaccagatcgtgttcagcaatcaatgctgcaagttctgcgtcatccagcagtgcattgactggcgtaatcgcgatatgtgggttgatccgcgtcagggcgtcacgggcggattccaccttcggttgcccgaccgtggcatcactgtgcagtgtctggcgttgcagattgctgaggctaaccgtgtcgaagtcgagcagcgtcaggttaccgacaccggcgcttgccagatactggctggctgcacagccgaggccgcccaggcccactatcagcacgcgagaatctttcagcgcctcctggccgtcaaaatcaaagccgcgcagaatgatttgccggttgtagcgcagcatctcctgatcgctgagttccgccattacaggcctccgaacaacgcgttaaacggttctacttccacccattcgcccacttccacattgccgcgatcgcgttccagcacgataaagcagttgccgaggctaaaggagctaaatatatgactaccctgatgtccggtggtcgtcacttccagttcgccatcggcgttgcgttgcagcacgccgcgctggaaatcaagacgtcctggcgtttttttcaggcgggacgctgtgcgtacgcgctggcgcgcgggcaggccgctggcggtgttaccgcttagttttgccagcaaaggctgtaccagttgatagaaggtcagcgtcgcactaaccgggttgcccggcaggccgcagaaccagctattgctgagtttaccgaacgcgaacggtttacctggtttaatcgccagcttccagaaggcgatctcccccagctcttcaagaatcgttttggtgtaatccgcctcacccacactaacaccgccggaactgatcaccacatccgcctggctgtcggcttcaataaatgcggcgcgcagggcatggggatcgtcgcggataatccctaagttaattacctcgcatcccaactgttctaacatcaggtgtacggcgagacggttggtatcgtagatttggccgtcgcccagcggctgaccgggcaactggagttcatcaccggtagaaaaaagcgctacacgcactttacgaatcaccggaacttcggcaatccccagactagcaattactggcagctctgcggtagtcaggcgagttcccgccgggaaaacaaccgcacctgcagagatatcttcaccgcgacggcgaatattttgcccgctacgcacttcagcagtaaaacgcacgccattgtccatttgttcagtctgctcctgcatcaccaccgcttcgcagccttccggcaccggcgcaccggtcataatacgaatgcaggtacccgcaggccattcaccatggtatggctgaccggcaaaggatttaccggcaacgggcagcggttgcccggaggcaatatcggctaaacgcaccgcgtagccgtccattgcggagttatcaaaccccggaacatcaagcgggctaacgacatcgctcgccagaatacgaccaaaacactgtaccagtggcagcgtttcctgggcggtcagtggggtgacgcgagaaagcatctcattaagcgcggtgtcgaggctcatcaatccggtggtaaattccatgaaaacactcctgcggaggcaaaatcgaatttgcctattatgtcagaaaaacgccacagactgtatgccacctcgggcgtagcgctgggtcctgcctttacatgccatatccatctttctatattcaaaaattgaatgagtaattcataaaaattctgatatttatagcaaaagtggcgaaccacccttaatggacgaatactatgggcaaagcagtcattgcaattcatggtggcgcaggtgcaattagccgcgcgcagatgagtctgcaacaggaattacgctacatcgaggcgttgtctgccattgttgaaaccgggcagaaaatgctggaagcgggcgaaagtgcgctggatgtggtgacggaagcggtgcgtctgctggaagagtgtccactgtttaacgccggaattggcgctgtctttacgcgtgatgaaacccatgaactggacgcctgtgtgatggatggtaacaccctgaaagccggtgcggtggcgggcgttagtcatctgcgtaatccggttcttgccgcccggctggtgatggagcaaagcccgcatgtgatgatgattggcgaaggggcagaaaattttgcgtttgctcgtggcatggagcgcgtcagcccggagattttctccacgtctttgcgttatgaacaactactggcagcgcgcaaggaaggggcaaccgtcctcgaccatagcggtgcgccactggatgaaaaacagaaaatgggcaccgtgggggccgtggcgttggatttagacggcaatttggcggcagccacgtccacaggcggaatgaccaataaattacccggacgagttggcgatagtcccttagtgggtgccggatgctacgccaataacgccagtgtggcggtttcttgtaccggcacgggcgaagtcttcatccgcgcgctggcggcatatgacatcgccgcgttaatggattacggcggattaagtctcgcggaagcctgcgagcgggtagtaatggaaaaactccctgcgcttggcggtagcggtggcttaatcgctatcgaccatgaagggaatgtcgcgctaccgtttaacaccgaaggaatgtatcgcgcctggggctacgcaggcgatacgccaaccaccggtatctaccgtgaaaaaggggacaccgttgccacacagtgatgaacttgatgccggtaatgtgctggcggttgaaaatctgaatattgcctttatgcaggaccagcagaaaatagctgcggtccgcaatctctcttttagtctgcaacgcggtgagacgctggcaattgttggcgaatccggctccggtaagagtgtgactgcgttggcattgatgcgcctgttggaacaggcgggcggtttagtacagtgcgataaaatgctgttgcagcggcgcagtcgcgaagtgattgaacttagcgagcagaacgctgcacaaatgcgccatgttcgcggtgcggatatggcgatgatatttcaggagccgatgacaagcctgaacccggtatttactgtgggtgaacagattgccgaaagtattcgtctgcatcagaacgccagtcgtgaagaagcgatggtcgaggcgaagcggatgctggatcaggtacgcattcctgaggcacaaaccattcttagtcgttatccgcatcaactctctggcgggatgcgccagcgagtgatgattgcgatggcgctgagttgccgcccggcggtgctgattgccgatgagccaaccaccgcgctggatgtcactattcaggcgcagatcctgcaattaatcaaagtattgcaaaaagagatgagcatgggcgttatctttatcactcacgatatgggcgtggtggcagagattgccgatcgggtactggtgatgtatcagggcgaggcggtggaaacgggtaccgtcgaacagatttttcatgcaccgcaacatccttacacccgtgcgctgttagctgctgttccgcaacttggtgcgatgaaagggttagattatccccgacgtttcccgttgataagccttgaacatccagcgaaacaggccccccccatcgagcagaaaacggtggtggatggcgaacctgttttacgagtgcgtaatcttgtcacccgtttccctttgcgcagcggtttgttgaatcgcgtaacgcgggaagtgcatgccgttgagaaagtcagttttgatctctggcctggcgaaacgctaagcctggtgggcgagtctggcagcggtaaatccactaccgggcgggcgttgctgcgcctggtcgaaagccagggcggcgaaattatctttaacggtcagcgaatcgataccttgagtcccggcaaacttcaggcattacgccgggatattcagtttatttttcaggacccttacgctagcctggacccacgtcagaccatcggtgatagcattatcgaaccgctgcgtgtacacggtttattgccaggtaaagacgcggctgcacgcgttgcgtggttgctggagcgcgtgggcctgttacctgaacatgcctggcgttacccgcatgagttttccggcggtcagcgccagcgcatctgcattgctcgcgcgttggcattgaatccaaaagtgatcattgccgacgaagccgttagcgcgctggatgtttctattcgcgggcagattatcaacttgttgctcgatctccagcgtgatttcggcattgcgtatctgtttatctcccacgatatggcggtggtagagcggattagtcatcgtgtggcggtgatgtatctcgggcaaattgttgaaattggtccacggcgcgcggtcttcgaaaacccgcagcatccttatacgcgtaaattactggcggcagttccggtcgctgaaccgtcccgacaacgaccgcagcgtgtactgctgagcgacgatcttcccagcaatattcatctgcgtggcgaagaggtggcagccgtcagcttgcaatgcgtcgggccggggcattacgtcgcacaaccacaaagtgaatacgcattcatgcgtagataacattcaggcggagaataaaatggcaagagctgtacaccgtagtgggttagtggcgctgggcattgcgacagcgttgatggcatcttgtgcattcgctgccaaagatgtggtggtggcggtaggaagcaatttcaccacgctcgatccgtatgacgcaaatgacacgttatctcaggccgtagcgaaaagcttttaccaggggctgttcggtctggataaagagatgaaactgaaaaacgtgctggcggagagttataccgtttccgatgacggcattacttacaccgtgaaattgcgggaaggcattaaattccaggatggcaccgatttcaacgccgcggcggtgaaagcgaatctggaccgggccagcgatccggcgaatcatcttaaacgctataacctgtataagaatattgctaaaacggaagcgatcgatccgacaacggtaaagattaccctcaaacagccgttcagtgcgtttattaatattcttgcccatccggcgaccgcgatgattagtccggcagcgctggaaaaatatggcaaggagattggtttttatccggtgggaaccggaccgtatgaactggatacctggaatcagaccgattttgtgaaggtgaaaaaattcgcgggttactggcagccaggattgcccaaactggacagcataacctggcgtccggtggcggataacaacacccgcgcggcaatgctgcaaaccggtgaagcgcagtttgctttccccattccttacgagcaggccacactgctggagaaaaacaaaaatatcgagttgatggccagtccgagtattatgcagcgttatatcagtatgaacgtgacgcaaaagccgttcgataacccgaaggtccgtgaggcgctgaattacgccattaaccgtccggcgctggtgaaagttgcctttgcgggctatgcaacgccagctactggtgtggtaccgccaagtatcgcctacgcgcaaagttataaaccgtggccttacgatccagtgaaagcgcgcgaattactgaaagaggcgggatatcccaacggtttcagtaccacgctgtggagcagtcataaccacagcaccgcgcagaaagtgctgcaatttacccagcagcagttagcgcaggtcgggattaaagcccaggtgactgcgatggatgccggacagcgggcggcagaagttgaaggtaaagggcaaaaagagagcggcgtgcggatgttctacactggctggagcgctagtaccggcgaagcggactgggcactaagcccgctgtttgccagccagaactggccaccgacgctgtttaataccgcgttttacagcaataaacaggtggatgacttcctggctcaggcactgaaaactaatgatccggcggaaaagacccgcttatataaggcggcgcaggatatcatctggcaagaaagcccgtggatcccgctggtggtagaaaaactggtgagcgcacacagtaaaaacctgaccggtttttggatcatgccagacaccggcttcagctttgaagacgcggatttgcaataagcaacgcagggagtggaatgcttaattacgttatcaaacgcttactggggttgattccgacgctgtttatcgtcagcgtgctggtgtttttatttgtccatatgctgcccggcgatccggcgcgattgattgccgggcccgaagctgatgcgcaggttatagaactggtgcgtcagcagctggggttggatcagccgctgtatcaccagttctggcactatatcagcaatgctgtgcagggggattttggcctgagcatggtgagccgtcgtccggttgccgatgagattgccagccgctttatgccaacgctgtggctgaccataaccagtatggtctgggcggttatatttggtatggcggcgggaattatcgccgccgtctggcgtaaccgttggccggatcgattgagtatgaccattgcggtgagcgggatcagctttccggcatttgctctggggatgcttttaattcaggtattctccgttgaactgggctggctgcctaccgtgggagcagacagttggcagcactacattttaccctccctgacgctcggcgcggcagtggccgccgtgatggcgcgctttacccgcgcgagctttgtcgatgttttaagcgaagattatatgcgtaccgcgagggcgaaaggggtgagcgaaacctgggttgtcctcaaacacgggctacgtaacgcgatgatcccggtagtgaccatgatgggcttacagtttggctttttgctcggtggttccatcgttgtggagaaagttttcaactggccgggacttggacgcttactcgttgactccgtagaaatgcgtgattacccggtgattcaggcggaaattctgcttttcagcctggaatttattcttatcaacttagtggtggatgtgctttacgccgccattaacccggctatcaggtacaagtaaggatgcgactatttaactggcgacgtcaggcggtgttaaacgccatgccactggtcaaacctgaccaggtacgtacaccgtggcatgaattctggcgacgatttcgccgtcagcatatggcgatgaccgccgcattattcgttattttattgattgtggtggccatttttgcacgctggatcgctccctatgacgccgaaaattattttgattatgacaatctgaataacggaccttctttgcagcactggtttggcgtcgatagtctggggcgtgacattttcagccgtgtcctggttggtgcgcaaatcagcctggcggcgggcgtgtttgccgtgtttatcggtgcggcgatcgggacgttgctgggcttgctcgctggatattatgaaggctggtgggatcggctgatcatgcgcatttgcgatgtgctgtttgccttcccgggtattttactggcgatcgctgttgttgcggtgttgggaagcggcattgctaacgtgattattgcagtcgccattttttccatccccgcgtttgcccgcctggtgcgcggcaacacgctggtgttgaaacagcaaacctttattgagagtgcacgcagtattggtgccagcgatatgaccgttttgttgcgtcatatcctgcctgggaccgtctcttctatcgtggtgtttttcaccatgcgcattggtaccagcattatctctgccgccagcctcagttttctcggcctcggtgcgcagccgccgacaccagagtggggagcaatgctcaatgaggctcgagcggatatggttatcgcgccgcatgtcgctgtttttccggccctggctatttttctgaccgtactggcgttcaatttgttgggcgatggtttacgcgatgcgctggatccgaaaattaaaggataattacgtttgaatattgcttgaaagggtaatcacctcacaggaaattattgccctaagcaagtgttgtaactttctgctgattttgtagaatcgggtaatttggttaaaaagccgcagcaagggacaatttttgcagcggcacagcgttcagatagttattttgttaaatgtattaacatgctgagtttatacgaaaagataaagataaggctgataattttatttttattggcagcactgagttttattggtctttttttcatcattaactatcaactggtaagcgagcgcgcggtaaaacgtgccgatagccgctttgaacttattcagaaaaacgttggctatttctttaaagatattgaacgtagcgccctgacattaaaggacagtctgtatttattaaaaaatacagaggagattcaacgcgccgtgattcttaaaatggaaatgatgccatttttagacagcgtgggactggtacttgatgataataaatattatctttttagccggagggcgaatgataaaatcgttgtttatcatcaggaacaagtaaatggaccgcttgtcgacgagagtgggcgggttatttttgccgattttaacccaagcaaacgaccgtggagcgtggctagtgatgactctaacaacagctggaatccggcatacaattgctttgatcgtccgggtaaaaaatgtatctcttttacgctacacatcaacggcaaagatcacgatttgttagcggtggataaaattcatgtcgatttaaactggcgatatctgaacgagtatcttgatcaaatcagcgctaatgatgaagttctatttttgaaacaaggccatgagatcattgccaagaatcaactcgctcgtgaaaaactgattatttataatagcgaaggtaattataatattattgattctgtcgatactgaatatatcgaaaaaacaagtgcggtgccaaacaacgcattattcgaaatctatttttattatcctggcggtaatttattgaacgcaagtgataaacttttttatctgccgtttgcgttcattattatcgtattgctggtggtttatttaatgaccactcgtgtgttccgtcggcaattttctgaaatgacagagctggttaatacgctggcgtttttgcctgacagtacggatcaaatcgaggctctgaaaattcgtgaaggcgatgcgaaagagattatcagcatcaaaaatagcatcgcggaaatgaaagatgccgaaattgaacggagtaataaattgctcagtctgatctcttacgatcaggaaagtggttttattaaaaatatggcgattattgagtctaacaataatcagtatctggctgtggggatcatcaaactgtgtggtctggaagccgtggaagcggtgtttggtgttgatgagcgcaataaaatcgtcaggaaattgtgtcagcgaattgccgagaaatatgcgcaatgctgcgatatcgtgacattcaatgccgatctctatttacttctgtgtcgggaaaatgtacagacatttacccgtaaaatagcgatggtaaacgattttgacagcagctttggctaccgcaatctgcgcatccataagtctgccatttgtgaacctttgcagggggaaaacgcctggagttacgcagaaaaactgaaactggcgatttccagtatccgtgaccatatgttcagtgagtttattttctgtgatgacgcgaaactcaacgaaatagaagagaatatctggattgcgcgtaatattcgccatgcaatggaaattggcgaactattcctcgtctatcaaccgatcgttgatattaacacccgcgccattctgggcgcggaggcgttgtgccgttgggtgtctgcggagcgggggatcattagtccgctgaagttcattaccattgctgaagatatcgggtttatcaatgagctgggttatcagattattaaaacggcaatgggtgaattcagacattttagtcagcgtgcgagcctgaaggatgatttcttactgcatattaatgttagcccctggcagttaaacgaaccacactttcatgagcgttttaccaccatcatgaaagaaaatggcctgaaggcgaacagcctctgtgttgagatcactgaaaccgtgatcgagcgaattaatgaacatttttatctcaatattgaacaactgcgtaaacaaggggtacggataagcattgatgactttggcaccggtttgagtaacctgaaacgtttttatgaaattaatccagacagcataaaggtggacagccaattcaccggcgatattttcggtactgcgggaaaaattgtgcgcattattttcgacctggcacgctataaccggatcccggtgattgcggaaggcgtagagagcgaagacgttgcgcgcgaattaatcaaattaggatgtgttcaggctcaggggtatctgtaccagaaacccatgccattctccgcctgggataaaagtggaaaattagtaaaagagtaatttacgtatgtccagaatcaataagttcgtacttacagtcagtctgctgatttttatcatgattagtgcagttgcctgcgggatctacactcaaatggtaaaggaacgggtgtatagcctgaaacagtccgttattgatactgcttttgcggtggcaaatattgctgaatatcggcgtagcgtggcaattgatcttatcaacacgctaaatcccacggaggaacagctgttggttggtttgcgcacagcttacgccgacagcgtttccccctcttatttgtacgatgtcggtccttatctgatttccagtgacgaatgtattcaggtaaaggagttcgagaaaaattattgtgcagatattatgcaggttgtgaagtatcgacatgtcaaaaatacagggtttatctcttttgacggtaaaaccttcgtctattacctctatccggtaactcacaatcgtagtctgatatttttgcttggtctggagcgtttttctttactgagtaaaagcctggcgatggacagcgagaacctgatgttctctctatttaagaacggtaaaccggtgaccggtgatgaatataatgctaaaaacgccatcttcaccgttagcgaagcgatggagcacttcgcctatttgccgaccggattgtatgtatttgcgtataaaaaagatgtttatttgcgggtttgtacattgattattttctttgccgcattggtggcagtgataagcggtgccagttgcctctatctggtacgcagagtgattaatcgtggtattgtggagaaagaagccatcattaataaccattttgaacgcgtactggatggcgggcttttctttagcgctgccgatgtcaaaaaactctacagtatgtataacagcgcgttcctggacgacctgaccaaagcaatgggcagaaaatcctttgacgaagatttaaaagcgctgccggaaaaaggcggttatttgtgcctgtttgacgtcgataaattcaaaaacattaacgacaccttcggtcatttgctgggcgatgaagtgttgatgaaagtggtgaaaatccttaaaagtcagatcccggtagataaaggtaaagtctaccgcttcggcggtgacgaatttgcggtgatttatacgggtggaacgctggaagagttgctaagcattctaaaagaaatcgttcatttccaggtgggaagcattaatttaagtaccagtatcggtgtagcacatagtaatgaatgtcctaccgtcgaacgcttgaaaatgctggcggatgagcggctgtataagagtaagaaaaacggcagggcacagattagctggcagtaatcattattcgcaggccggacaaatgattttgcccggcctgaattaattaaacccggctaccccacaaatcgtactcatcggcgtgctcgactttcacacgcaggatatcacccggcttaacgttggtttcaccattgagataaaccgcgccgtcgatttccggtgcatctgccatgctgcgaccaatcgcgccttcttcgtccacttcgtcgataatcaccagaatttcacggcccactttctcttgcaggcgctcggcggaaatctgctgctgcagctgcatgaaacggttccagcgttcttctttaacttcttccggaacctggtcaggcagggcattggcgtctgcaccttcaaccgggctgtatttaaagcagccaacgcgatccagacgcgcttctttcaggaagtcgagtagcatctggaaatcttcttctgtctcgccagggaagccgacaataaaggtactgcgtagggtcagttccgggcagatttcgcgccactgtttgatgcgcgccagttggcgatctacagaacccggacgcttcatcagtttgagaatgcgcgggctggcgtgctgcaacggaatgtccagatacggcaggattttgccttctgccatcagtgggatgacgtcgtccacatgcggataagggtaaacgtagtgcagacgtgtccagatccccagtttgcttaactgttcgcacaggctgaccatgctggtttttaccggctcgccgttgtggaagccagtacgatgtttaacatcaacgccataggcggaagtatcctggctgatcaccagaatctctttaacgcccgcatctaccagacgtttcgcttcacttaacacttcgccaatcggacggctcaccaggtcgccgcgcatagacggaataatgcagaaggtgcagcggtgattacagccttcagaaattttcagataggcataatgacgcggcgtcagtttcacaccttgttctggcaccaggctcaggaatgggttgtgtttcggttttggcacgtagtgatgaacgtgctccagaacctgctcatagctatgaggcccggtgatttccagcactttcgggtggacttcgcggatctgatcttcttttgcccccagacaaccggtcacaataaccttgccgttttcattcaacgcttcaccaatggcttccagactttcttgtaccgcgctgtcaataaagccgcaggtgttgacgatcaccatgtccgcatcgtcatagctcggtaccacgtcataaccttcagtgcggagttcggtgagaatacgctcactatcaacaaggtttttcggacagccaagggaaacaaagccgattttcggctggggagttactttgctcatagcttaaaaaatattcagttacaggaaaggtcagggcagggattctacagagttctggataaaatttgtatcgcaatctcattcgctggcggaggcgaaggaaatgtaaattttgttaattcggcgtgaagaattgatcctggacagcattttgctcaaaaaatagccatactatttaattgcaacaaggctgggaagaggaggatcgaagtatgttcgttgacagacagcgaatcgatctgctgaaccggttgatcgacgcacgcgttgacctcgccgcatacgtgcaactgaggaaggcaaaaggatacatgtccgtcagcgaaagcaatcatctacgagataacttttttaaactgaatcgcgaactgcacgataaaagcctgcggttgaatcttcatctggatcaggaagagtggagtgctcttcatcatgctgaagaagcattagcgacagccgcagtatgtttgatgagtgggcaccatgattgcccgactgttattaccgtcaacgccgataagcttgaaaattgtctgatgagcttaacgctgagtatccagagcctgcagaagcacgccatgcttgagaaggcctgaaaactaagggggagaaagcgtctcccccttcatgtttaagtttttgtaaaaatgaatttgttatctcctccactgactacgctttaagccagagtcaatccggaggcgttatgcatcgacaatcctttttccttgtgccccttatttgtctttcttccgctctctgggcggctcctgcaacggtaaatgtcgaagtactgcaagacaaactcgaccatccctgggcactggcctttttacccgataatcacggtatgttaatcactctgcgcggcggcgagttgcgtcactggcaagcaggaaaaggattatctgcgccgctttccggagttccggacgtttgggcgcacgggcagggcggcctgctggacgtggttttagcgcctgattttgctcagtctcgccgcatctggttaagttattccgaagttggcgatgatggcaaagccggaactgctgtgggttatggccgcttaagtgatgatctcagtaaagtgaccgacttccgcaccgtctttcgccagatgccaaaactgtctaccggcaaccattttggcgggcggctggtattcgacggtaaaggttatctttttattgctctgggcgaaaacaatcagcgcccgacggcgcaggatctggataaattacagggcaaactggtgcgtctgaccgaccagggcgaaatcccggatgataatccttttataaaggaatccggtgcgcgcgccgagatctggtcttatggcattcgtaatccgcaaggaatggcgatgaatccgtggagtaatgcactgtggctgaatgaacatggcccgcgcggtggtgatgaaattaatatcccgcaaaaaggcaaaaactacggctggccgctggcaacctggggaatcaactatagtggctttaagataccggaagcgaaaggggagatcgtcgccgggaccgagcaacctgttttttactggaaagatagccccgctgtgagcggcatggccttctataacagcgataaattcccccagtggcagcaaaaattatttattggcgcgctgaaagataaagatgtcattgtgatgagcgtcaacggcgacaaagtgacagaagatggccgtattttaacggacagagggcagcgaattcgtgatgttcgcactggacccgacggttatttatacgttctcaccgacgagtccagtggggaattacttaaagttagcccacgcaattaactaacgggaatcatcaccactttgcgcactgcggggcgttcagtgagttgctgataccagcgttgcagatttggacgcggtgtccaggtcaggccaacgttaaacaaattgtagatgaacggtgcgatagcgatatcgcccacaccaaactcgtcgccagagaaccattttacttttgccagttccgcatcgagcagggcaaacagggcgtcgcactctttgcaactggcatcaatggcggcctgatcgcgctcttccggtggtgttctgactaatcccatcaggatcccgcgatgagcattactgagcgtctggtttgcccagtccatccatttttccgcttccgcacgacgtgccggactgtcgatccacaggcgtttttgcccgtactgtgccgccagatagcggacaatggcgttactttcccaaagaatgagatcactttcgtcgtcacgcaacaacggcaccagcccgttagggttcatcgccagaaaatcagcatcgtgatttatcccaaactcacggcccgcgagaatttgctcataaggtagttccagttcttcgagcgtcagcaatactttttttacgttagtactattattccgaccccacagcgtaatcatactcaccccttttccgacaggcagccacaggctgaacaggactccgatggtgaagtaaagttaacttttaagcaacagctggcaaaaaaatgacaccagaagcagcgaagcggcaggatattgcataaactttaaaaactttaccaacttacggtttctttaagtttgtgtgtgcgttattaatcaccaaacttatcatacggcgatataacgtattttttttgaatggatactcgggtggcatttatgacgcaatactcctctctccttcgtggtcttgcagcgggttctgcatttttattcctttttgccccaacggcattcgcggcggaacaaaccgttgaagcgccgagcgtggatgcgcgtgcatggattttaatggattacgccagcggtaaagtgctggcagaaggcaatgcggatgagaaactggatcccgcgagcctgactaaaatcatgaccagctatgtggttgggcaggcgcttaaggccgataagattaaactcaccgatatggtgacggtcggtaaagatgcctgggcgacgggaaatccggcactgcgtggtagtagcgtaatgttcctcaaaccgggcgatcaggttagcgtggcagacttgaacaaaggtgtgattatccagtccggtaatgacgcctgtattgcgctggctgattacgttgccgggagccaggagagttttattggtctgatgaatggttatgccaaaaaactgggtctgaccaacactaccttccagacggtgcacggcctggatgcgccggggcagttcagcaccgcgcgcgatatggcattgctgggtaaagcattgatccacgatgtgccggaagagtacgccattcataaagagaaagagttcaccttcaacaaaattcgtcagcctaaccgtaaccgtctgctgtggagcagcaatctgaatgttgatggcatgaagacaggaaccacggcaggcgcgggatataatctggttgctagcgctacccagggcgatatgcgtttaatctccgtagtgttgggggcgaaaaccgaccgtatccgttttaatgagtctgagaaattattgacctggggtttccgcttctttgaaaccgtgacgccaattaaacctgatgccacctttgtgactcagcgcgtctggtttggtgataagagcgaagtgaatctcggggcaggtgaagcgggcagtgtgaccataccgcgtgggcagctgaaaaacctgaaagcgagttatacgttaacggaaccgcagcttaccgcaccgctgaaaaaaggtcaggttgtcgggaccattgatttccagcttaacggtaaatccattgagcagcgtccgctgatcgtgatggaaaatgtggaagagggcggattctttggtcgggtgtgggatttcgtgatgatgaaattccatcagtggttcggcagctggttctcttaatcttctgataaccggatggcgcgaaacgtcatccggttatacgtcattaatacatcaacttaatgcgctgcgtctgcgcgtacttcacatactcatcttccgggcaacaatcgctcaccacaatatcaaagcgtttcaggtcacccatgcgcgccggacgcaccttgccaaatttactgtggtcgacaaccagcacatgcttttgcgccatgctcatggcccagtgttttaccggcaactcttcaagattaaaacaggtagcgcctttactgacatgcacgcccgccgcagaataaaaagcgatatccgggcaaaaattattcagcgtttgctgaaaatcgatgggtttgaaaatggcgttgctggcgtgaaattcaccaccgcaaagaaacgcgcggcaatggggtttctctttcagcgccagaaaggtatttaggctataacaaacggcggtaaaagggatttcattatcaatcgcttcaataatccacggcgtggtggtgccacagtcaaaaaagagggtctgatcgggttctaccagcgtcgcagccagttttgccgcccggcgtttttcttccaccaggcgggatttttgatcgcttaacaggtaatggctggcactgcgcggttccagaacaatatagccgccgagcaaaacgacgggcgcactgtggttgttcagatcgcgacgaatcgtcatctcgctaaccccaagcagggcggcggcgtctttaagatgtaacttatcgctgcgttttaattcttgcagcagctgcccgatacgctcttcgcgacgtgtttccataatccctctgaatagttattgaagcgagccgctcaatactacactttttagcagagatcagtcacgcacccagcctttgcggatcggtaatgcaaaacagacgcgataccagctttgcagacgttgatagagtttatgccccatcgcttgccagataatctgggcactaaggcagccaatcatacctgccagcaatccaccgagcatatccagcggccagtggacgccaagataaacgcggctccaggcaatgacgacggccagcaccattaaaagactgccggaccacaggcgatgccagcataaaaatgccagtgcaaaggtgaaaatcaccgtaccgtgatcgcttgggaaactgtcatccgccgcatgatgcaggaagttatagccgatattttcgacaaagggtcggtcgtgcggaaaaagatgtcccatcgtccaggacacaaacaggctgaccgccagcgcgatagcgatttttatcaccagttgccgttgtgctgtaagcccccacaaccaaagtaccacggccagcaacggcaccacggtaatcaaatctttagcaataaaaatcgccaagctgatcatccacggagcgctgtctggcgtcgcgttaataagagagaatagagagagattcaaattttccagcataacttcccgacgcaaagtgattaaaagggagccaatacaggcaagtcgttgagaataaagtgcaggttaaactgggtaaagcggcatcgtcttatttccctcaagcggcctgtttacggtgggtgattgtaacgggcataggttaaataaaacttaaagaaagcgtagctatactcgtaataatgtaagaatgtgcttaaccgtggtttcagctacaaaattcgctttctcgttagctgcgcttttattaaactctgcgcgattattattggcgaagaaattgcatgcaaaataaattagcttccggtgccaggcttggacgtcaggcgttacttttccctctctgtctggtgctttacgaatttagtacctatatcggcaacgatatgattcaacccggtatgttggccgtggtggaacaatatcaggcgggcattgattgggttcctactagcatgaccgcgtatctggcgggcgggatgtttttacaatggctgctggggccgctgagcgatcgtattggtcgccgtccggtgatgctggcgggagtggtgtggtttatcgtcacctgtctggcaatattgctggcgcaaaacattgaacaattcaccctgttgcgcttcttgcagggcataagcctctgtttcattggcgctgtgggatacgccgcaattcaggaatccttcgaagaggcggtttgtatcaagatcaccgcgctgatggcgaacgtggcgctgattgctccgctacttggtccgctggtgggcgcggcgtggatccatgtgctgccctgggaggggatgtttgttttgtttgccgcattggcagcgatctcctttttcggtctgcaacgagccatgcctgaaaccgccacgcgtataggcgagaaactgagtctgaaagaactcggtcgtgactataagctggtgctgaagaacggccgctttgtggcgggggcgctggcgctgggattcgttagtctgccgttgctggcgtggatcgcccagagcccgattatcatcattaccggcgagcagttgagcagctatgaatatggcttgctgcaagtgcctattttcggggcgttaattgcgggtaacttgctgttagcgcgtctgaccagccgccgcaccgtacgtagcctgattattatgggcggctggccgattatgattggtctattggtcgctgctgcggcaacggttatcagtagccacgcgtatttatggatgactgccgggttaagtatttatgctttcggtattggtctggcgaatgcgggactggtgcgattaaccctgtttgccagcgatatgagtaaaggtacggtttctgccgcgatgggaatgctgcaaatgctgatctttaccgttggtattgaaatcagcaaacatgcctggctgaacgggggcaacggactgtttaatctcttcaaccttgtcaacggaattttgtggctgagcctgatggttatctttttaaaagataaacagatgggaaattctcacgaagggtaaaaaaatgcctgactgctttgtgcgatcaggcattctcgaattaatggtgatggtcgtcaatctggtgttcgataaccatcccttcacctacgctggcaagatggcgaacataaggatgcgggcggtaagccggagctggcgcaggagccacatagacggtttgcggcacagtcgcgacgctgaccgcttgtggaacgctgacactatcaggaaccacaaccactttgtatccactcggcacatcgacggtgacactttgcgccatcgccacaccagtaaagcccattaaaagcgcgcccaacagtagacaatttttcataatcatttcgcctgaaataatgcagcgggttaatttccgcgaattatgcagccttcattcaggcattgtgttgccgggcgtgctgccggttttattggtcaaatggcgcttcgtgtttaagaactttatcgatcacatccagtacgccttcacggttattggagcctgcgcggtattttgccgctgcgacgaccgcgctaccggcattttccattgcaaaactaaagcctgcctgacgcagcatctcaatatcgttaccgccatcgccaaagaccaccacttcgctgtcgtctattccccataatttctgcagttggcgaaggccattggctttatgtacgccggggataatcagatcgatgctgccgttgccggtgtggacgctcaccataatatcgccgatggcctcatgtaatgctttttgtacttgtggaatcagttcatcggaaagattcaggccaaacttaaagaagatatcctctaagttgtcaaagttatcgacgtattccagacggtgataatacatttccgccaccgttttcatggcatcgtcatattttttgagtgtataggcactattttttccgcaggcaataatttccacttccgggcgcgtcagcaaatgttccacgacagtagcaaacgcatccttgcttagctcgccattaaaaacatctttgccttcgctcactacccagccgccgttttcagccacaaaggcaatttcattagcaatttcagggaagaaagagatcaactgataatattgattcccgctggcgactacaaagcgaattccttgtgctttcatttgctgatactgagccataaaccgctcacggttataggttttttgatcgcttaagaaagtaccatccatgtctaccgcaattaatttaatgctcatcaactattctccatcgccgtctgcgttttggtatcgggtttggcgacggctttcgcgacaatagccgcgagaataaccagcgccagtacaaccagcattgcactacgtaatccataatgttcgccgagatagcccagcagcggcggcccgacgaggaaagccagataaccggtcgttgctaccacactgacgcgggttggtgcatcggggccggtatcgctggcggcagaaatggtcagcgggaagcccaggctggcacccagtccccagagtacaacagacaccccagcgacccaggcgctatcgacaaaaataatcagcccaatacccaacgcccccattagtgcactggcccgaaccacggcaacgcgactgtaacggtcgatgaaccaaccgccggtgaagcgtccaacggtcatccccagggtaaaaccggcataaatcaggctgccggaagtagggctaaaaccgtgaccgtcaaccattaataagggtaaccagtcgttggcagaaccttcggcaaaggccatcgccagcaccacaacacctatcagcagcaactggatatcgcgataaaaaggtacgcctttttcgccatgctgggtgccatcggcagcatttttgcccgtaccgtcagggattgcctgaatggcgatataaataggtgcgatacctaccagcgccgccaataaaatgtgcaccgttgccggaacgccaaaggccgtcagtgccatcccgacacctgcgcctgccagcgtgcccaggctataaaaaccgtgcatcatcggcaaaaccgtcttattcatttctcgctcaacggcagcaccttcaacgtttatcgccacttccgcagaaccaaaacttgccccaaagacgccgagaccaacggcaaagagcagggggcttgtcagccagagtgccagacttaatatcatcatcccgatcaatgcgcaggacatcgtgaccaggatgacattacgtgtcccaaagcgtttcactaaccacgcgctgcagagaataccgctcatgctaccgatgctcagaccaaagagaacaccgcccatttcagcgatgctgacagagagaatatcgcggatagcaggcgtacgggttgcccaggacgccattaacaggcctggcaaaaagaagaacataaacagcgcccaggttcggcgtttcaatgcattacgactagaatttacggtcatagatcacgtcaaaataagaagagggaagacaacattagcaaggttgtgtacatttgtacacaattgcagagagaggaaatgacatgcgtcgcgctaacgatccgcaacggcgagaaaaaattatccaggccacgctggaggcggtgaaactttacggaatacatgctgttacgcaccgcaaaattgctacccttgccggggtaccgttgggaagcatgacctactattttagtggaattgatgagttgttactggaggcgttcagcagttttactgagatcatgtcccggcaatatcaggcattttttagcgatgttagtgatgctccgggcgcatgccaggctatcaccgatatgatctacagcagtcaggttgcaacgccggataacatggagctgatgtaccagctctacgcgctggctagccgaaaaccgctattaaaaacggtaatgcaaaactggatgcagcgcagtcagcaaacgctcgaacaatggtttgaacccggaaccgcccgcgcgcttgatgcgtttattgaggggatgacgctgcattttgtcaccgaccgtaagccgctaagccgcgaggagattttgaggatggttgagagggttgcagggtaatagataagttttagataacaaaaaacccatcaaccttgaaccgaaatggcggggttgatgggctccacaaaatggggacatcaaagaaaagcagtggcactaattaagactgatgccctgcggaaaagttctgcggttgtgcaaaaaaatttcattttcagggcaacttcagttttatcctaatcctggccataccatgacgatgattgtccctgccagcgtcagcaggacgttggcgattgcataggtgcccgcatagcccagcgccgggatgttactgcgagctgtatcactgatgatctccattgccggcgcgcaggtacgtgcgcccatcattgcgccgaacaacagcgcgcggttcattcgcaatacataagcaccgaacaagaaacagataaccacgggcaccagactgacaatcaatccggcaatcaacatctgaccgccaatcgcgcccaggccgttattaataccgctaccggcgctcagaccaacgcctgccataaacaccatcaagccgaactctttcaccatgcttaatgcaccctgcggaatgtaaccgaaggtcgggtggttagcacgcataaagcccagcataattccggcgaataacaacccggcagcgttccccatgccgaaactgaatgtgctgaactggaaggtgatcatcccgatcatcagcccaataacaaagaaggcgcagaatgccagcaggtcagtgacctggctgtgaatgctgataaagccgatgcgatcggcgatggtttttacgcggcgggcatcgccgctgacttgtaaaacgtcacctttgttaagcacgacgttgtcatctatcggcatctcaatctggctacgaatgacgcggttaaggaagcaaccgtgatcggtcaacttcagttgtgcgagacgtttacctacagcgttatggtttttaacgaccacttcttcagtgacgatacgcatgtcgagaaggtcacgatcgaaaacttctttaccgttacggaagctgggatcgagtcgggcatgggcgtcgggatagcctaccaacgctatttcatcgcccatttgtagcacggcatcaccgtctggatttgccagaatcccgttacgtcgaatacgttcaatgtagcagccggtttgtcgataaatacccagttcacgcagatttttgccgtcggtccaggccaccagttccgggccgacgcgataggcgcggatcaccggtaaataaaccttacggttggcatcagtgtccaggccacgttcgcgggcgatttgctgggcgctggtctgtaagtcctgatgctgcaatttcggcaagtaacgcgcaccaacaatcaaactcaccagaccgattaaataggttaaggcatacccgaggctcagattatccagtgccagactgagctgcctgctttccatgccggaatgacgcagtgtatcgccagcaccgaccagaaccggtgtgctcgtcatagagcctgctaacataccggccgtcaggccaatatcccagccaaacagcttacctaaccctaaggcgatcaccagcgcactgccaaccatcaccagtgctaacattaggtaatttttcccatcgcgaaaaaaaatggaaaaaaagttcggtccggcttcgaccccgacgcagaaaataaacagcataaagccaagattaagcgcatcggtgttaatgctgaaatgttgttggcctaataacaggcttacgactaaaacgccaatggaattacccagttggatgctaccaagtcgtaactttccgagacatagcccaagcgcgaggaccacaaataataacagaatgtaattcccatttaacaattcggcgacgtttatattcacggaggctaacttcttgtttactagtaagctgttgaaagaaatggtaatttacgataatgttttttaccagaattcagggcgcagattcattcagcgcacctaaacgatagtaaagtaacaatatattttactagtgtaatcacattaggtatcaacggctatatgaattgcgttggcctatattagcatggaatgcgaagcggctttatcttactgaacgccacactggcgaaaaatgtgttcgatagacgcagtgtcaggaggaacgagtgaaacataaacaacgttgggcgggggcaatctgctgttttgtcctcttcattgtggtgtgcctttttctggcgacgcacatgaaaggcgcttttcgggctgccgggcatcctgaaatcggcttgctatttttcattcttcctggagcagtcgccagcttctttagtcagcgtagagaagtcctgaaacctctgtttggcgcaatgctggcggcaccctgtagcatgctcattatgcggctgttttttagtccgacgcgcagtttctggcaagagctggcatggttactaagcgcggtgttctggtgtgcgctgggggcactgtgtttcttatttatcagtagtttgtttaaaccacagcacagaaaaaatcagtaaagccctcaacgcgagggcttgtcagacgatcaggcgtccagattttctttcacccatgcagcaaaatcggtatagccgccgatatgttgctgatcgacaaaaatctgcggcacggtttctacgggtttacctgccttttgttgtagatcttctttagtgatcccttccgcacgaatatctacatactgatactgaaaatcatcgcgttcattgctcaatttctcagccagatcttttgcacgcacacagtaagggcaaccgctacgaccaaaaataacggtttgcattatttctctcctcatagatttatgcctgtaatgatcacgctaaaatgtattcgctgaaagtaggtttaacctgttgcattaattgctaaaagctataactgttaaacacaatacagtgaaaagttttagactgaaggctcactttgcagagggaagcgtatgcgcgcgatcggtaaattgcctaaaggcgtgttgatactggaatttatcggaatgatgctactggcggtggcgctgctgagcgtaagcgactccctgagcctgcctgagccattttctcggccagaagtgcagattctgatgatttttctcggtgttttgctcatgcttcccgctgcggtggtggttattcttcaggtggcaaaacgtcttgccccacagctgatgaaccgtccaccgcaatatagtcgtagtgaaagagaaaaagataatgacgccaaccattgaacttatttgtggccatcgctccattcgccatttcactgatgaacccatttccgaagcgcagcgtgaggcgattattaacagcgcccgtgcgacgtccagttccagttttttgcagtgcagtagcattattcgcattaccgacaaagcgttacgtgaagaactggtgacgctgaccggcgggcaaaaacacgtagcgcaagcggcggagttctgggtgttctgtgccgactttaaccgccatttacagatctgtccggatgctcagctcggcctggcggaacaactgttgctcggtgtcgttgatacggcaatgatggcgcagaatgcattaatcgcagcggaaagcctgggattgggcggggtatatatcggcggcctgcgcaataatattgaagcggtgacgaaactgcttaaattaccgcagcatgttctgccgctgtttgggctgtgccttggctggcctgcggataatccggatcttaagccgcgtttaccggcctccattttggtgcatgaaaacagctatcaaccgctggataaaggcgcactggcgcagtatgacgagcaactggcggaatattacctcacccgtggcagcaataatcgccgggatacctggagcgatcatatccgccgaacaatcattaaagaaagccgcccatttattctggattatttgcacaaacagggttgggcgacgcgctaaaaccgccacgtcgatgtatgatacgcgggcttttgaccaggtctgacagagaggtgcagggtgaaaattgccatattgtcccgggatggaacgctctatagctgtaagcggctgcgtgaagccgctatacagcgcggtcacctggttgaaattcttgatccgctttcttgctacatgaacataaatcctgcggcgtcttctattcactacaaaggccgcaagttaccccattttgacgcagtgatcccgcgtattggcaccgccattaccttttatgggacggcggcactgcgccagttcgagatgctggggagctatccgctcaatgagagcgtcgccattgcccgggcgcgtgacaaattgcgttccatgcaactgctggcgcgtcagggcatcgacctgcctgtcacgggcattgcgcatagcccggatgataccagcgatttaatcgacatggtcggtggtgcgccgctggtggtcaagttggttgaaggcacgcagggaattggcgtcgtgctggcggagacgcgtcaggcggcggaaagcgtgattgacgctttccgcggtctgaacgcgcatattctggtgcaggaatatatcaaagaggcgcaagggtgcgatatccgctgtctggttgttggcgatgaagtggtcgctgcgattgaacggcgggcgaaagagggcgattttcgttccaatttgcatcgtggcggcgcggcaagcgtcgccagtatcacaccacaggagcgtgaaatcgcgataaaagccgcgcgaacgatggcgctggacgttgctggtgtggatattctgcgtgctaatcgcgggccgttggtgatggaggtgaatgcgagcccggggctggaaggaatagaaaaaaccaccggtatcgacatcgcgggtaaaatgatccgctggatcgaacgccacgctacgacagaatattgcctgaaaacgggtggttaatcgcaatcacattactgatcatggttttgcctgcgctttttgcgtaagctgtgccggtctttttatcgaaagaggttgtacaaaattatgacaagcctggtcgttcctggtctggatacgctgcgtcaatggctcgatgacctggggatgagtttttttgaatgtgataactgtcaggctctgcatctgccccatatgcagaatttcgacggtgtctttgatgccaaaatcgatctgatcgataacacgatcctgttttctgccatggcggaagtccgacctagtgccgtattgccgctggcggcggatttatctgccatcaatgccagtagcctgaccgtgaaagcatttcttgatatgcaggatgataatctgccaaagctggtggtttgccagtctttatccgttatgcagggcgtaacctatgagcagtttgcatggttcgtgcgtcagagcgaagagcagattagcatggtcattcttgaagctaatgcccatcaactgctgttaccgactgatgatgaagggcaaaacaacgttaccgaaaactatttcctccactgataactcctttcgagcacgcagtcgctggtgcagtggctgcgcgctgcaaaattatctgctgtttttaaccttttcttaaagattatttcacttctcttgtgtcgatttggctttatcacatagagcaaatatgcataaaaatttgttaaataccgttttttaatccgagctatagtctcaaaccctggctaaagttattcttgcgatgcttttatatagcgagcagtgctggccgggagaaagttctcttttcttacaccgcgccgataaaaaatatgcacgtttattgcatatctttcagtgtgacaacttttgttcgtttgttaacgaactttcagaaggaaagagatatgaccgccttaaataaaaaatggctaagcggtctggttgcgggtgctctgatggccgtctctgtcggcacgctcgcggctgaacaaaaaacactccacatttataactggtctgattatatcgccccggacacggtggccaattttgaaaaagaaaccggtattaaagtcgtctacgatgttttcgactctaacgaagtactggaaggcaaattaatggccgggagtaccggctttgatctggtggttccatctgccagctttctggagcgccagttgactgcgggagttttccagccgctggacaaaagcaaattgccggagtggaagaatctcgacccggaactgctgaagctggtcgccaaacacgatcccgacaataaatttgctatgccctatatgtgggcgacgaccgggattggctataacgttgataaagttaaagcggtgctgggcgaaaacgcgcccgtcgatagctgggacttgatcctcaaacctgaaaatctggaaaaactgaaaagctgcggtgtctctttcctggatgcgccagaagaagtttttgctaccgtgttgaattatctcggcaaagatcccaacagcactaaagcggatgattacaccggaccggcaacagatctgctgttaaagctgcgcccgaacattcgttatttccatagttctcaatacattaacgacctggcaaacggcgatatttgcgtcgctatcggctgggcaggtgatgtctggcaggcgagtaaccgcgcgaaggaagcgaagaatggcgtgaatgtcagcttcagcattccaaaagaaggggcgatggcgttctttgatgtattcgccatgcctgcggatgccaaaaacaaagacgaagcctatcagttcctgaattacctgctgcgcccggatgtagtagcgcatatttccgaccatgtgttctatgccaacgccaataaagcagccacgccgctggtgagtgcggaagtccgtgagaacccaggtatttatccgcctgcggatgttcgtgcgaagctgttcactctgaaagtgcaggatccgaaaatcgaccgtgtgcgcacccgcgcgtggaccaaagtgaagagcggaaaataatccgcagtcgtagatgccggaggggcgcaccacacccgccggcaattcgcaccattatggtgcgcttgcacacattcaatgccggagagcagccgtgaatgacgctatccctcgcccgcaggcgaaaacccgtaaggcgctgacgccgctattagaaatccgcaacctgaccaaatcctacgatggtcaacatgcggtggatgatgtcagcctgaccatctacaaaggtgaaatcttcgcgctgctgggcgcatccggctgtggcaagtccacgctgctgcgtatgctggcaggtttcgaacaaccttctgccggacagataatgcttgatggcgtcgatttgagtcaggttccgccttacctgcgccccatcaatatgatgtttcagtcttacgcgctgtttccgcatatgaccgtggaacagaacatcgcttttggcctgaaacaggacaaactaccgaaagcggaaattgccagccgggtcaatgagatgctcggcctggtgcatatgcaggagttcgccaaacgcaaaccgcatcagctttccggtggtcagcgacaacgtgtggccctggcccgaagccttgcgaagcgcccgaaactattactgctcgatgagccgatgggcgcgctggataaaaagctgcgtgacaggatgcagcttgaagtggtggatattctggagcgcgtcggtgtgacttgtgtgatggtcacccacgatcaggaagaggcgatgaccatggcggggcgcatcgccattatgaatcgtgggaaatttgtccagattggcgaaccggaagagatctacgagcatccgactacccgctatagcgccgaatttattggcagcgtaaacgtctttgaaggcgtactcaaagagcgtcaggaagatggcctggtgcttgatagcccggggctggtgcatccactgaaagtcgacgcggatgccagcgtggtcgataacgtgccggtacatgtggcgctgcgcccggaaaaaatcatgctttgcgaagagccgcccgccaatggttgtaacttcgcggtgggggaggtgatacacattgcctatctcggcgatcttagcgtgtatcacgttcgtctgaaaagtgggcagatgattagcgcccagctacaaaacgcccatcgtcatcgtaaagggttaccgacctggggcgacgaagtgcgtttgtgctgggaagtggacagctgtgtggtgctgacggtttaaggagcaaagatgagtacacttgaacctgctgcccagagcaaaccgccgggcggatttaagctgtggttgagccagctgcaaatgaagcatgggcgcaaactggtcattgcgttgccatatatctggttgatcttgctgtttctgctgccatttctgattgtctttaaaataagcctggcggagatggcgcgcgctattccaccttataccgaactgatggagtgggctgacgggcaactgtccatcactcttaatctcggtaattttctgcaactgaccgacgatccgctctatttcgatgcttatctccagagcctacaggtggctgcgattagcacattttgctgtttactgatcggctatccgctggcgtgggcggtggcgcacagtaagcctagcacccgtaatattttattactactggtgatcctgccgagctggaccagctttctgatccgcgtttatgcctggatgggaatattaaaaaacaacggtgtgctgaataattttctgctgtggctgggggttatcgatcaaccgctgaccattctgcataccaatctggccgtttatatcggcattgtttacgcttacgtgccgtttatggtactgccgatttataccgcgttgattcgtattgattatagcctggtggaagcagcgctggatctcggtgcacgaccgctgaaaacgttctttactgtgatcgtgccgctgactaaaggtgggattattgccggaagcatgctggtgtttatcccggctgtgggcgagtttgtgatcccggaactgctcggtggcccggacagcatcatgatcgggcgcgtgctatggcaagagtttttcaataaccgcgactggccggtggccagcgcggtagcgatcatcatgttgctgctgctaattgtgccgataatgtggttccacaaacaccagcaaaaaagcgtgggagaacacggatgaataatttaccggtagttcgtagcccctggcggattgtgattttgctgctgggctttacctttctctacgcgccaatgctgatgctggttatctatagctttaacagcagcaagctggtgacggtgtgggccggctggagtacgcgctggtatggtgagttattgcgcgatgacgcgatgatgagtgcggttggtttaagtctgacaattgcggcctgtgcggcgacggcggcggcgatcctcggaactattgcggcggtggtgctggtgcgctttggcaggtttcgcggaagtaatggctttgcctttatgatcaccgcgccgctggtaatgccagatgtcatcacgggcttgagcctgttgttattattcgtcgcgcttgctcatgccattggctggcctgcggaccgcggtatgctcaccatctggctggcgcatgtcactttttgtacggcttatgtggcggtcgttatttctagtagattgcgggaactggatcgcagcatagaagaagcagcgatggatctcggtgcgacgccgctgaaagtgtttttcgtcattacgctaccgatgatcatgcccgcgatcatttctggctggttactggcttttactttgagccttgatgatctggtgatcgccagctttgtttccgggccgggagccaccacgttaccgatgctggtcttttccagcgtgcggatgggggtgaatccggaaatcaacgccctggcaacattgatcctcggcgcggtcggaattgtcggatttatcgcctggtatctgatggctcgcgcagaaaaacagcggatacgcgacatccagcgtgcaagacgtggctgaagacactaaaatttgccaacctggctacataatgccgcgcatgtcgcggcattgttttcatggaagacgaaacgttgggattttttaagaaaacatctagttctcatgctcgcctgaatgtgcctgcgctggtgcaggtggcggcgctcgccattattatgatccgtggcctcgacgtgctgatgattttcaatacgctgggcgtgcgcggtattggcgagttcattcatcgcagcgtacaaacctggagtttaacgctggtctttttaagcagtctggtgctggttttcattgagatctggtgtgcgtttagtctggtgaaagggcgtcgctgggcgcgctggctatatctgctgacacaaatcaccgccgcaagttacttgtgggcggctagcctggggtacggttatccggagctgttcagcattcccggtgaaagtaaacgtgaaatcttccatagcctgatgctgcagaagctgccggatatgctcatcctgatgctgctgttcgttcccagcaccagtcggcggttcttccagttgcaataatgtgtataatcgtcgcccctgatgatgtgaaggtcaatgtatgcagtgcgcactttacgacgcgggtcgctgtcgttcctgtcagtggataatgcagccgattccagagcaactctccgctaaaaccgccgatcttaaaaatctgctcgccgactttccggttgaggaatggtgcgcgccggtgagtggcccggaacaagggtttcgtaataaagccaaaatggtggtgagtggtagcgttgaaaaaccactgctcggtatgctgcatcgcgatggcacaccagaagacctttgtgactgcccgctttatcctgccagttttgcgcccgtttttgcggcgctaaaaccgtttatcgcccgagcggggttaacgccctacaacgtggcgcgtaagcgtggcgaactgaaatacattctgctgactgaaagccagagtgatggaggcatgatgctgcgctttgtactgcgttctgataccaagctggcgcaactgcgtaaggcgctgccgtggttacacgaacaactaccgcagctgaaagttattaccgtcaatattcagccggtacatatggcgattatggaaggggagacggagatctacctgaccgaacaacaggcactggcggagcgttttaatgacgtaccgctgtggatccgtccgcaaagtttcttccagactaatccggcggtcgccagccagttgtacgccaccgcgcgcgactgggtacgacagctgccggttaaacatatgtgggatctgttctgcggtgtggggggctttggtttacactgcgcgacgcctgacatgcagttaaccgggatcgaaattgcaagtgaggccattgcctgtgcaaagcagagtgccgctgaactgggcttaacgcgtttgcaatttcaggcgctggactccactcagtttgccaccgctcagggggatgtgccggagctggtgctggttaacccgccgcgccgcggcattggtaaaccgctgtgtgattatctcagtacgatggcaccgcgttttatcatctactccagctgtaacgcccaaactatggcgaaagatatccgcgaactgcctgggtttcgtattgaacgggtgcagcttttcgatatgttcccgcataccgcgcactatgaagtgctgacgctgctggtgaagcaataaaaaagccgcatgtgcggcttcagattgctgacaaagtgcgcgttgtttatgccggatgcggcgtaaacgccttatccggcctacaaaagcgtgcaaattcaatacattgcatgggccatgtaggcctgataagcgtagcgcatcaggcaattttacctttgtcatcagtctcaagccgcggttgcggctttctgaatcttactgtgggaaccactggtcactgattttttgataagtaccgtcagctttaattgctgccagcgcgttattcagtttttccagcagggctttgttatccggacgtacagcgatgcccaggccggtgccaaaatattgcggatcggtcactttctcagtagcaacaccaagttgtggattggttttcagccattcgtttaccaccgctgtgtcaccaaataccccatcaatacgaccatttttcagatcgataaaggcattctgataactgtcataagagacagttttcacttccgggtgctgatcctgaatatatttctggtgcgtagtaccgttttccatcccaatacgtttgcctttcagatcggcaaacgttttgtaggtatcttttttggcaatcacgacggcactgttttcatagtagggcgtggtaaagcttacctgtttgctacgctccggggtgatatccataccggagattacggcgtcatattttctgaatttcagggacgggatcaggctgtcgaacgcgtgattagtaaaagtacattctgcctgcatttgtttgcacaaggcttttgccagatcgatatcaaagccgacaatctcattattagcacctatagattcaaagggtggataggtggcactaacgccaaaattgattttctctgcggcagaagcaccgaaagtaaaggaagcaagtaaagcggcaagaactaactttttcatgatggaactcccgtctgtcaatcttatgatttttggccgtgtctgcggcatgggataacaatgccatcaagtgaatttatatgcaataaacatgattaaataatttaaatgaaataaaaaagacggacaacttagtgggttgtccgtcttcattataagaatttatgcactatgtaggccggataaggcgtccccgccgcatccggcacaggcaccgtgctgatgtctgatgcgacgctggcgcgtcttatcagacctacaaaaccccccggcgaatgtacgcagccacattaatttcgccgttcgaatgccagcgctttgcgctcgatcagacgcatcatcagcgtcagcaggccgttaacgaccaggtaaataatccctgccgcaccgaacaccattacatcgtaggtgcgtccgtacaacaactggctgtatcccatcacttccatcagcgtaatggtgtatgccagagaggtacttttgaataccagcaccacttcgttggaataagaagagaggctgcgtttaaaggcatacggcagcaggatcgccagcgtatcttttttgctcattcccagggcgctacaggactgccactgaccttccgggatcgcacgaattgcaccgtaaaacagctgcgtggtatacgccgcactattcaggctcaacgcaatcagcgcacataaccacggttcactcaacaaatgccacagtgccggatactcctgcaaagtcggaaactggcccggcccgtaataaatcaggaagatctgcaccagcagcggcgtaccggtaaacagcgtgatataaccccgcaccagccacaccagcaccggcgttttcagcgtcaggatgatggtaaaaatcaatgccagaatcagtgccacaatcaggctggcaacggttagcgtcaggctggtgtgtagccctttcatcagttcgggtaaatactcaaacattagctgggcctccgctcaaaacgtgtcgcgcgcaggtcaatgcgtttgagaatgtactgactgagcagggtgatcaccaggtaaatcgccgccgccacaatgtaccaggtaaatggttcctgggtacgagtagcgatgctttttgtttgcagcattaaatcattcacactaatcaaactgaccagcgcggtatctttcagcagcaccagccactggttaccgaggccaggcagcgcatgacgccacatctgcggcatcaccagacggaaaaagatagcgcttttgctcagccccagcgcctgaccagactcccactgacccaccggcaccgctttcaacgcgccccgaagcgtttggctggcataggcggcatacagcagactcagagcgatgacaccacaaaggaacgggctaacgtcgaagttctcaatgtccatctgcactgggatctgcacgaacccaagattgatagtgaagccatcgctaagcgtcagcagcagctggctggagccaaaatagataaacagcaccaccagaatttctggcaggccacgcagaatggttaccagcgcactacctgcccacgcgacaggacgccattttgcgctctcccataccgcaaagaacatcgccagcgccagcccgacaatcaatgcacaaacggcaaggccgacggtcatcccggcggcgcttgctaaaggaaaaaattcattcatcaggaattacttctggaaccatttgttgtagatggtttcgtaagtgccatctttcttcactttttccagcgcagtgttgagtttctgctgcagctcagtgttgccctgacgtaccgcgatgccgaggccagtgccgaagtaatctttatcggtcactttgtcgcccaccgccgccagtttcgggttatctttcagccactcagtgaccactgcggtgtcaccgaagacgccgtcgatacgcccgttttgcagatccagttttgcgttctggtagctgtcatacggaacggtagtgatttccgggtgcttatccataatgaatttctggtgtgtcgtcccgttctgtacgccgacttttttgcctttcagctgatcaacactggtgtatttgccttgctgacccacaaacagggcagagttgtcatagtacggggtggtaaacagcacctgcttttcacgctccggagtgatatccatgcccgccatcacggcttctacgcgacggaatttcaggcttgggatcaggctgtcaaacgcctggttagagaaagtgcaggttgcatcaatctctttacacagcgcttgtgccaggtcgacgtcaaaaccaacgatctggttgtttgcatcaatgctttcaaacggaggataggaggcttcggtagcaaaacgaatggtttcggcagctgtggcggaaagactaaaacctgcaattaacgcggcaatcagaacttttttcattgttgttatcccgaatcttagtgagagagatagtttttaaatgcttcggtttgcggctcggtaaagcagctcgcgtcgccttgttctacgatatgaccattttccatatacaccactcggctggcggttttacgcgccacttcaacttcgtgggtgacgatcacctgggtaatattcgtttctgccagctcacgaatgatgctgacgatttgtgccgtaatttccgggtccagtgcggcggtcggttcatcgaacagcagtacctgcggttccatcatcaacgcacgggcaatagcaacacgctgctgctgaccaccagaaagatgcagcgggtaacgatcgctataaggtttgagacgcagacgttccagcagtttttctgcacgggccagcgcctgatctttactcaaccccagtacacggcagggcgcttcaatcaggttttgctgcacggtcagatgcggccacaggttgtattgctgaaacaccatgccaacgttacgacgcaaatcgcgaatcgctttgtcagagggtgttttggtgaaatcgaaatggttgcctgcaatgttgagcgtaccggagcgcggcatctcaagcagattgagtacacgcagcaggctgcttttacccgcgccgctggggccaagtaacaccagcgtttcgccctgtgggcaatccagcgtgatatcgaacagcgcctgatgcgcgccgtagaagcaattaatgccgtttaattgaatactcattgacactcgtatactggcagtctgatagctattgaggtcgaagatagtacctttgacagaataattatgcaatatttctgctttaaaagttaaaagcaaagcgcattattcaataaacatagcacaaaataacgggggcggtggtcggcgagcataaatgtcggcattcctcacgaaatgccggacaatttacggggtttattggttgatcaaggcgttagcgattctcgatggactgacggagcgtacccgccgtggcatgaacgctaccgcctaagtaacgcacatcgtcgatgacccaacactggccttcctgaatcattaacacttcatcctgccaaccctggtcaccctgtttgagatccacgcgcaatggaatgttacgggcatcacgattagggatagtgcttgcactggcaacgtgggcgctatctggcaaggtggttcgactggagaatggatcgttggtcagtagttcccgatggttattatcccgggaggcatcgctaagcagtgtcgccagtttgtcgctcagataagggcgcaaggcggtgatgtcgttgctgcggtgcaaaatgcggtagtcataaaattgctgggccacgttatccgggcctccttcaacgcaaggaccactgcgtgtgccgttatctttataagctggagtgactgtggtgcaggcactgaggagcagtgcgcaggggataagcattgtcaatttgctgtagcgcataatgatttccttataagcgatcgctctgaaagcgttctacgataataatgatatcctttcaataatagcgtatcagtctgataatgcttttgagatcgaaggcttagcaaacaaggagatcgatcatgcaattttctacaaccccaactctggaaggccagaccatcgttgaatattgcggtgtggtgaccggcgaagcgattttaggtgccaatattttccgtgatttctttgccggtatccgcgatatcgttggcggacgttccggtgcgtatgaaaaagaactgcgtaaagcacgggagatcgcctttgaggaattaggctcccaggcgcgggcgctgggggccgatgccgtcgtcggtattgatatcgactacgaaacggtcgggcaaaacggcagtatgctgatggttagcgtcagcggtacggcggtgaaaacgcgtcgatgagaagattcttctggctggtcgctgccgctctgttattggcagggtgtgcaggcgaaaaaggcattgtcgagaaagagggatatcagcttgatacccgacgccaggcgcaggcggcgtatccgcgcattaaagtgctggtgatccactacaccgcagatgattttgatagcagcctggcgacactgaccgataagcaggtcagcagccattatctggtccctgcggtaccaccgcgatacaacggtaaaccgcgcatctggcaactggtgccggaacaagaactggcctggcatgcggggattagcgcctggcgcggggcaacgcgccttaacgacacctctattggcattgagctggaaaaccgtggctggcaaaaaagcgccggagtgaaatattttgccccgtttgaaccggcacagattcaggcgcttattccactggcgaaagatattattgcccgttatcacatcaagccggaaaacgtagtggcacatgcggatatcgcaccgcagcgcaaagacgatccggggccattatttccctggcagcaactggcgcagcaggggattggtgcctggccggatgcgcagcgggttaacttttaccttgccgggcgcgcgccgcacacaccggtagataccgcgagtttgctggagcttttggcgcgctacggttatgacgttaaacctgatatgacaccgcgcgagcagcggcgcgtgattatggcattccagatgcatttccgcccgacgttatataacggcgaagcggatgcagaaactcaggcgattgccgaagcattgctggagaaatacgggcaggattaacgcggcagttttccgtggtcgcgtagccaggcggcagttttctcgataccttcatccagggtgatgaccggctgataacctaactcttcctgcgcacgcgtaatatccagcgtaaagtcaaaattcaacttggagacgccgtagtgggtcagcggcggctcttttgcactcttgcggcctaaacgctccatgctgcgggcgatcatatccagcatcgggtaggggacggaacgaatacgacagtcaatattcaactcgtcgatcagcttctgcacgatgctgcgcagtgtgcgatgctcgccgttggtgatgttgtacacacgcccggaaggtagcttatcgcaggcttcctggcttgccagccacattgcgtgcacggcattttcatagtaggtcatatcgaccagcgcactgccgccatgcggtaacagaatactgccgtagtggtgcatcatatgcgccagacggggaataaagactttatcgtgcggtccgaacagactttgtgggcgcagaatagtaaagcgcgtttgtggattcgcctggctaagcatattgatcacttcttcgctggctgctttgctgcgggcaaactcgttggcgaagcggtgagggcgaaaatcttctttaatatcgcgatggtggtgataatcgaagtacagggagggggaagagatatgaataaagttacgcacaccccaggcgacagcccattcacccaggcggcgagtggcgcgaacgttagccagatcgaaagcctgttgtgtcccccagggactggtaaagctggagcagtgccacagcgtatcaatgcccgcgagcatcactttagcttgactactaaccagctcggtcagatccgccggaacaaactctgcgcccattttttccagcaatttgcccattgcctcgttgcgaccggtcgctcgcacgctgatgcctttctggcataaaaactctaccgcgtttcgacctaagccgctggtggcgccggtaaccagtaccttcatatcaatccactgttgttgagaaaataacgtgcgcattcttccgtgatttcccccatgatgcaatgggaaacatgaaagaataacgcaggttttgtcgattaatctgtgctttgttctgccagtctggcgatttgttttgccattccgcgaaaaataaacagatgcgcggggatcatcaataaccagtaaaacagccccggcataccgtgcggatgccagaaagcgcggacatcgatagtacgatagtcgcctttatcttccaggctaaaacacagtcgtcccagccccggcgctttcatgccaaataacaacgtaagttgtttttccggttcaacgacaatcactttccagctatccaccgcatcgccagtctgtaaatattcgcgctccgggcggcctttcgccagcttatgaccgatcgcgcggtccatcaacgcccgtgtctgccacaaaatattgccaaagaaataacgctctttaccgccgatttggttcactacctgccataaagcagcaaggctggcggacgttttaacggtaaaccccgcctgtttggcaaaataaccgtactccggtcgccagcgggcaaaggcctgagcgtcgtagccccagtcgctggagttgaccagtttttcctcctctttcaacgtgctacgtaccgcgtcatcgaaagcgatcagccgttgtgggatgagtgcacgtagcgcggtatcatccgccagcagatcgtgtttcagcccctgaatcaacgccctggcggtggtgggcggtacggaagtaatcacattgagaaaccacacgctaatccagcgggtggggagggggatggggatcaaccagcggcgcttaccgctcaccgccataaaatgttcaaactgttgctgataactgagcacctctggtccggcggcttcgaagatgcggtgttcgctggccggatgatctaacaacgcaaccagatagtgcagcaagttttccagcgcaatgggcgtggtgcgactacgaacccagcgcggaggcgttaagactggcaggttgtagaccatatcgcgcatgacttcgaacgccgcggaacctgcgccaacgataattccggcccgcagttcggtcacgggtacattcgcttcacgcagaatgtccgccgtagcctgacgagcacgcagatgatcgctctgctcatgtggcggggcctgcaagctactaagaaagattaattgcttaactggtacttcacgtagcgcatcgcggacgttgagagccacctggcgctcctgagcgataaaatcgccgccttcgcccatgctgtgcaccagaaaatagaccgtatcgatatcctgcaacagggccggtaggttatccggccagctgagatcgactttatggcaactgacgtttgccagttgcagctttgcaagcctgtcgacatgacgtgccgccgccaggatctgatgcccttgctggctgagtgtgcgcaccagatgctgaccaatgtagccactggcaccgagaactaaaatgcgttgcggcacgtctctctccttaacgcgccaggaatgcacgccagtgggcggcgacttccgccagttgttcgcggctgacgtcaagatgcgtcaccaggcggacaatcgggctggcgttaatcagcacgtttctcgctttcatgtattcgcctaacgcggcagcattttcttccccgacgcgaacaaacagcatattggtgtcctgacgcatcacatccgcgcctgcttcacgcagctgctccgccatccaggcagcgttgtcgtggtcttcctgcaagcgcgcaacgttatttttcagggcatatatcccggcggcagccagaatgccggactggcgcatcccgccacctgtcattttccgccagcgaatggcacgtttaatgtaatcacgattaccgacgagtaaactaccgactggcgtcccaagacctttgctcaggcaaatggtgaagctatcacaatattgcgtgatctctttcagttcgcagccgtaagccaccacggcattaaagatgcgcgcaccgtcaacatgcagcgccagattgcgctcgcgggtaaattcccatgcttctttcaggtattcccgcggcaacactttgccgttgtgggtgttttccagactgagtaatttggtgcgggcgaaatggatatcgtcgggtttgattttcatcgccactttatccagcggtagcgtgccgtcggcagccgcgtctatgggttgcggttgaatactgcccagcaccgccgcgccaccggcttcaaacagatagttatgcgcggcctgaccgacaatatactcttcgccgcgttcgcagtgactgagcagagcgaccaggttggcctgagtgccggtaggcagaaaaatggcggcttctttaccggaaagctctgctgcgtagtcctgcagagcattaacggtagggtcgtctccgtaaacgtcgtccccaaccggggcggccatcatcgcttcgagcatggcgcggcttggtcgggtaacggtatcactgcgtaaatcaatcatggcatgtccttattatgacgggaaatgccaccctttttaccttagccagtttgttttcgccagttcgatcacttcatcaccgcgtccgctgatgattgcgcgcagcatatacaggctgaaacctttggcctgttcgagtttgatctgcggtggaatggctaactcttctttggcgaccaccacatccaccaacaccggaccgtcgatggagaaggcgcgttgcagggcttcatcaacttcagacgctttttctacacggatacccgtaatgccgcacgcttcggcaatgcgggcaaagtttgtgtcgtgtagttcggtgccgtcagtcaaatagccaccagctttcatctccatcgccacaaagcccagcacgctgttgttaaagacgacaattttcactggcagtttcatctgcactacactgaggaaatcgcccatcaacatgctaaaaccgccatcgccgcacatggcgaccacctgacgttctggctctgtcgcctgcgcacccagcgcctgcggcatggcgttagccatgctaccgtggttaaagctacctaacaggcgacgcttgccgttcatttttagataacgtgccgcccacaccgttggcgtaccaacgtcacaggtgaaaatagcgtcatcggcggcaaaatgactaatttgctgcgccagatattgcgggtgaatggctttctcgctcggtttagctaaatcgtccagccctttgcgggcgtcgcggtaatcttccagcgctttatccagaaacttgcgatcggctttttcttccaccaatggaagcaatgcacgcagagtgctcttgatatcgccgaccagtgccatatccaccttgctgtgagcgccgatgctggctgggttgatatcaatctgaatgattttggcatcggtcgggtagaaggcgcggtagggaaattgcgtgccgagtagcactaacgtgtcggcgttcatcatggtatggaaaccactgctgaagccgattaacccggtcattccaacatcatacggattatcgtattcgacatgttctttaccgcgcagggcatgaacaataggcgctttaattttcccggcaaactcaactaactctttatgcgcccccgcgcagccgctgccacacatcagggcgatattgctggaataacgcagcagttgcgccagtttgcgtaactcttcttcttccggcgtcacgactggttgtggcgcatgataccagtgcatggttgccccttctggcgcaggttttaacgccacgtcgcctggtaacacgacaacgctaacgccacggttaagcaccgctttgcgcatggcaatcgccagtacttgtgggatctgctccgggctggaaaccagctcgcaatagtgactacattcgcggaatagctcttgtgggtgggtttcctggaaatagccgctgccaatttcgctggagggaatatgagcggcaatcgccagtaccggaacgtgattgcggtggcaatcgaacaggccgttgattaagtgcaggttgccggggccgcagcttccggcgcagaccgccagttctccgctaagttgtgcttcagcgccagcggcaaaggccgccacttcttcgtggcgggtggacatccactcgatggtgcccatgcgattaagactgtcactaagaccgttcagagagtcgcctgtgactccccagatgcgtttcacccctgcgctttcgagtgttttggcgatataagctgcaaccgtttgtttcatggttctccatctcctgaatgtgataacggtaacaagtttagttcatctgacggagggggaagggatgggagagaaaggaggcactaacggttaaatagcccgatgaaaggaatatcatcgggcataaggcgattatgcgagaaccaaatccccctgcggatggcaggagcaggccagtacgtaaccttcagcgatttcggcgtcggtcagcgtcattgtgctgctcaccgtatattcaccggaaaccacttttgtcttacagcagccgcaaacacccgcacggcaggcagcgacaaccggaacgttattgctttccagcgcctccagtagcgtggtgccaaccggggcgtaaaattctcgtgccggttgcagtttggtgaatttcagaccgctggtcgccgcttctgctactggggtgaagaatttctctttaaagaaacgcgtcacgccgagcgctttcacttcctgctctacccaatccatatacggagccgggccgcaggtcatcacggtacgactagctaagtcaggtacacctgccagcagttcgcgagtgagacgaccagcgataaagccttcggtaacgttattttctgccaccagcgttaccggatagttacgccactcatcggcgaaaataacatcctgcggcgtacgcacgttgtagatcacccgcacatcggcctgtggacggttcttcgcaagccagcgacgcatgctcataatcggcgtgacgccgcagcctgccgccagcaacaggaatttatcttctgctttatcgtcgcaggtaaattcccccatcgcgtcgctaagccagagataatcaccgcgttttacatcgcgcgtcagccactgggagccgacaccgtcatcaatccgccgcacggtcagggtgatatattcactcacgcctggcgtggaggaaatggtgtaagcacgcagcgtttccgcactgtttcgcacgctgaccagtgcatattgcccggcgcgatatgggtagtaatcgtggcaaatcagggaaatcgtccacacatccggcgtttcttgcgtaatgtgatgaacctgcatccgccacgggcattgattcgttggcatcgtcatcgacaaactccttacgcgctcaacagttgcttcatgtcttcttcaacagtggtgatagaacgcaggccgaatttctcgttcagcaccgccagcaggtctggtgtcaggaaaccaggtgcagtcgggccggtgacgatatttttcacgcccagagaaagcagcgtcagcagaatgacgatcgctttctgttcaaaccaggagagcaccaggctcagcggcagatcgttgacaccgcagcccagtttctctgccagagtgacagccagaataatcgcactgtaagcatcgttacattgacctgcatctaccagacgcggcagaccttcgatatcgccaaactcaagtttgttaaagcgatatttaccacaggcgagggtcaggatcaggcagtcatccggcacgctggtggcgaaatcggtgaagtagtggcgctcgccgcgtgcgccgtcacagccaccaagcaggaagatatgacgcagtttttcacggctcaccagatcaatcagcgtatcagcagcgccaagcagcgtctggcgaccaaaacccacggtgataaggtgcggaatttcgctgtacgggaagcctgccatctgttgcgcctgggtgataaccgcagagaaatcatcaccgtccagatgacgcacgccaggccagccaacaatgctgcgggtccagatacgatcgtcataagcgcctacggttgggtcgatgatgcagttgctggtcatcacgatggggccagggaaacgagcgaactccacttgctgattctgccagccgctgccgtagttaccgaccagatgcttgaatttacgcagctccgggtagccatgcgcaggcagcatttcgccgtgggtgtagacattaacgcccgtgccttcggtctgttccagcaggttgtagagatctttgagatcgtgaccggaaatcagaatgcatttacccgccgtcgctttgacgttgacctgggttggcgtcgggtgaccgtatttaccggtttcgcctgcatccagaatgctcatcactttgaagttcatctggccgatttccatactacactcaagaagcgcgttcatatcggcaggccaggtccccagccacgccatgattttatggtactgggcataaatatcgttgtcgtattgaccgagaacatgcgcgtgttccatataggccgccgcacctttcaggccatacaggcacagcagacgcaggccgagaatgttttcgccaatcgccgctttatctttgttaggggtaaattctgctgcctgacgttgcagctcgccgagatcgtcgctcaccagttgcaggtcagccatcgggttatcgacgcgcgcgttggcatctacagccaggcattgcgctttcagcgcctcgcgcagggcaatcgcttcacgagcgtagccgacaatacgcggagaatcgaagttaacgttggtcagggtactgaaaaaggcacgtggcgcgaagctgtcaacatcgtggttgatgatgccgtattcacgcgcttttaccgcccaggcagaaagcccttgcagcgccgcgatgagtaaatcctgaaggtcagaagtttccgccgttttaccacacatcccctgcgcgtaactgcagccgtttcctgccggagtacggatagtttgttcacattgcacacaaaacatgatcacaccttttaaagttatatttaatatacatgtttaaggttaagacgcttaacgcggggataaaagggatttttcatgcaactttaagggagattgatttagcgcaattttggcggcagggatctaccgccagagaggtattacgcagagaaaaaggcgatgaggatcggcactaacaggctaagaataaaaccgtgaacaattgccgccgggaccatatccagcccgccagtacgttgaagaacgggcagggtgaaatccatacttgtggcaccgcataagcccagtgcagtagagcggctgcggcgaatcagcccagggatcaacataatagcaatcagttcacgggccagatcattaaaaaacgccgcgctcccgattaccggaccaaaagattcggtcaataaaataccggaaagagaataccagccgaaaccggaggccattgccagcgcggtattgatggggagatcaagaataaaggcgttaattaaaccaccaattaaactactgacaaccaccaccacggcgacaatcattccccggcgattaaggacaatctgctttaaggtcatgccattattgcgcaactgaataccaacgaggaaaagtagcaaaattaacgtgtattcactggcttcggtcgcgtgttgtaagaaagccagtccacttagaccaatggcaaaaccaatcactactacgccgcacagttttaggctctccagcgccatcgcaatacggctcgggagtttttcttgctgatggtggttgcgccacggcaggcctcgctccagccacatcagggcggcaatattacacagtaaaataacggtaatactgacggcagaataatgcagaatcgccaacaggttactggcgaggttatcgagaaacgccagactgatacccataaaaaagagaataaggtaaaccatccagcttaatagctgattaataacttttaacgcagcttgttggcgaagcggaatgaggtaacccacaatcaggggaaccagaatgattaacagcccagaaaacatgaaaacccagtccttgcaaagatgaagtcgaaatgcgcgatgacacactactgaaagcggaaggacgagtaaagttgcaattaaaaggaaatgttatgcataaggagcagtagagtattcgttttcatttaaagatattcttgcgctttaattacaaactgcaccgatgttggtggcgtcaaaatcgccgaggcgttccctgaaggccggggcagcccacatggatgtgggctgagggcgcgttttacagggatgttacctcgcgcccgacccggtagccgtaagggataagtcgagggcaccgcgcagcggcgattttgttcgccagagcccgggggtgcagggggcggcggcgattggccgccccctgcgcgctccttgcgccagtggcaatatgttgcttagctcatgaaaggagcgcaacaagatgatgaatcaacatataacaacatcttaaaaaaaggcctgacattacgccaggccttctgcgttaattaatcacgcttttccagcagggtccggtaaatcagaccaccgataatgccgccgacaattggcaccacccagaagaaccacagttgttctaatgcccagccgccctggaagatagcaaccgcggtgctgcgcgccgggttaacagaagtgttagtcaccggaatactaattaagtgaatcagggttaaggccagaccaatagcgatcggcgcaaaacctgccggcgcgaatttgtcggttgcgccgtggatcaccaacaggaaacctgcactcaataccagttcaactaccagcgcggaaagcatggaataaccgcctggactatgctcgccataaccgttagaagcaaaaccgctggctgccgcgtcaaaacccgttttaccactggcaattaaatacagcagcgccgctgcaacaataccgccgacaacctgggcaattacgtagccaacgacttcttttgccggaaaacgtccgccagcccataaaccaatagtgaccgccgggttaaaatgaccaccagaaatatgaccaacagcaaaggccatcgtcagaacggtcagaccgaacgccaacgccacgccggcaaaaccaatgcctaattccgggaagcctgcggccagtacagcactaccacagccaccaaaaacaagccagaaagtaccaaaacattcagctgctaattttctgaacatatccaccacaattaaaaattgaccctgtgaaaaatatggtcgttttatagggtcgtcgtaaaaaagtgacgacggaaataatgcgcggctattttaaaaacgaaggcgagtcattcaccagataaataaatccagtaaatttgatttagggcaacagcgggttgccccatatagtcatttgtctgattgacagtgtagtgcacgcaaaagatttaatcctttaggcgtaataaaaaataatttatcatgctaattatttgattttgttgtttttgcagacttatcagcaagagggagtataacgcgattattcgctcatttttcagacatttgccatgcttaaatgtgatgtcatcacgtattagcaaggcctttcccgttatactgccagcgtaaaggataagtcacatatttctggaggggatatgattcttgagcgcgttgaaattgtgggttttcgcggtatcaaccgtttgagcttgatgctggaacaaaacaacgtcctgattggggagaacgcgtggggtaaatccagcttgctggacgccttaactctgctgctaagcccagaaagtgatctctaccattttgagcgcgacgatttctggttcccgccgggagatatcaacgggcgagaacatcatctgcatattattttgaccttccgcgaaagcctgccaggccgacatcgggttcgccgttatcggccgctggaagcgtgctggacgccatgcaccgatggctatcaccgtattttttatcgtctggaaggggagagtgcggaagacggcagcgtgatgacactgcgcagttttctcgataaagacggacatccgattgatgtcgaggatattaacgatcaggcacgccatctggtgcgtttaatgccggtgctgcgcttgcgtgatgcccgttttatgcgccgtattcgtaacggcacggtgccaaatgtccctaatgtggaagtcaccgcgcgccagctcgatttcctcgcccgtgagttatccagtcatccgcaaaatctctctgatgggcagattcgtcagggactttccgcaatggtacagctgcttgagcattatttctctgagcagggggccggacaggcgcgatatcgtttaatgcggcggcgagccagcaatgagcaacgaagctggcgctatctggatatcatcaaccggatgattgaccgacctggtgggcgcagctatcgggttattttgctcggcctatttgctactttgttgcaggcaaaaggcacattgcgactggataaagacgcccgtccattgttgctgatcgaagatccagaaacccgtttacaccccattatgcttagtgttgcctggcatctgttgaatcttctgccattgcagcgcattgccaccaccaacagcggtgagttgcttagcttaacgccggtagagcatgtttgccgactggtacgtgagtccagccgcgttgccgcctggcgtctggggccgagtggcttgagtaccgaagatagccgacgcatatcctttcacattcgttttaaccgtccgagtagcctgtttgcacgctgctggttgctggtggaaggggaaacggaaacctgggttatcaatgaactggcgcgtcagtgcggacatcattttgatgccgaagggatcaaggtcattgagtttgcccagtccgggctaaagccactggttaaatttgcccgccgaatggggattgaatggcatgtactggtcgatggcgatgaagcagggaagaaatatgccgctacggtacgcagcctgttgaataacgatcgggaagccgaacgagaacatttaacggcgttaccggcgctggatatggaacattttatgtatcgccagggattttccgatgtgttccaccgcatggcgcaaatcccggaaaatgtaccgatgaatctacgcaaaattatcagcaaagcgatccatcgctcttccaaacccgatcttgccattgaagtggcaatggaggcaggacgtcgtggtgtggactccgtaccgacgctgctgaaaaaaatgttcagtcgcgtgctgtggctggcgcgcggtcgcgcggattaaccgcgaaacatcgtggccatttgtggctgaatagcgtcgagcatctcatagcgccgacggtattcagcccgttttttactggcgatttcggcaatctcttttcgtgctatctgtgctggaaggcggtaatggcgttcagcatcacatacgccgccaacgctttcccagaaagcgttgtaatcagcgtggatcttgccttctttatcgcgataacgcaggctgcggtaaatatgcgtttcattgctgacggcaataatctgctctacctgcaaacgttgggcaaacagacaggccgcttccatcacgaggcgtttgggaaatagcccgtggcaggctttcgtcgcattctggatttcctgatgtggaatttcccattttgcgccttgcagtccgccaataaacatcgttcttttcccctgatattcacacagggtaaacgtgatctctgccagaggaataccttcgctgttgcggaacaggattgtgctgtcaccttctttatccatactgatcatcatggtcagctcaagcgtgaactgctcgccgtttttgccttccagcttcgccagttgcagcccgggggtattcaaatataagctgaattcttccgcgctcatacattcgcggagtaacgcataatggtaacgtaacgcctccagcaattgcttacggctaagattcgccgcaaggtaagggcgatgcagacgcacaggcagtcgcggctggcgcgttaacaatacattgagattaggccagtgggaaagttcgttcatccactcaacgcttaaacgcggcataatcaagctgcgcagcaaaaatttctggcgaaaactacggcgatgccagaatttacccggccgacactgtccacgtgccagactaagaaaaagactcaggctgctgagagattcagatggcgtaaaggtccgttcagttagctggctcatattcatgaaatcaatggttatacatggcgtgcttttcaccattgcgtatcttaaccaaacatcaatagtgtgattactaacgtaaattttagggttttgttgatatttcgttgaagttaatgacccggattggcatatggagtattcagaaaatttatgaaaaagcggaaaaccgtgaagaagcgttacgttattgcgctggtgatagtcatcgccggactgattacgttatggagaattcttaacgcacccgtgccgacttatcagacgctgattgtgcgccccggtgatttacagcaaagcgtgctggcgaccggaaagctggacgcgctgcgtaaggttgatgtgggcgcgcaggtcagcggtcagttgaaaactctgagcgtggcgattggcgataaagtaaaaaaagaccagcttttaggggttattgatcctgaacaggctgaaaaccagattaaggaggtcgaagcaacgctgatggagctacgtgcgcagcggcagcaggcggaagcggagctgaaactggcgcgggtgacgtattcccgtcagcaacgtctggcacaaacgaaggctgttagtcagcaggatctcgacaccgccgcgacggagatggctgtgaaacaggcgcaaattggcaccattgacgcgcaaatcaagcgcaatcaggcttctctcgatacggctaaaaccaatctcgattacactcgcatcgttgccccgatggccggggaagtcacgcaaatcaccactctgcaaggccagacggtgattgccgcacaacaagcaccgaacattctgacgctggcagatatgagcgccatgctggtaaaagcgcaggtttctgaagcggatgtaatccacctgaagccggggcaaaaagcctggtttacggtgcttggcgatccactgacgcgctacgaggggcaaatcaaggatgtactaccgacgccggaaaaggttaacgacgctattttctattacgcccgttttgaagtccccaaccccaatggtttgctgcggctggatatgactgcgcaagtgcatattcagctcaccgatgtgaaaaatgtgctgacgatccctctgagcgcgttaggcgatccggttggcgataatcgttataaagtcaaattgttgcgtaatggtgaaacacgcgagcgtgaagtgacgattggcgcacgtaacgataccgatgttgagattgtcaaagggcttgaagcgggcgatgaagtggtgattggtgaggccaaaccaggagctgcacaatgacgcctttgctcgaattaaaggatattcgtcgcagctatcctgccggtgatgagcaggttgaggtgctgaagggcatcagcctcgatatttatgcgggtgagatggtcgcgattgttggcgctagcggttccggtaaaagcaccctgatgaatattctcggctgtctggataaggccaccagcggcacctatcgcgtcgccggtcaggatgttgccacgctggacgccgatgcgctggcgcaactgcgccgcgagcatttcggctttattttccagcgttaccatttgcttagccatttaaccgccgagcagaacgttgaagtacccgccgtctatgctggtcttgagcggaaacagcgactgcttcgtgcccaggagttgctgcaacggctggggctggaagaccgtacagagtattatccggcacagcttagcggtggtcagcaacagcgcgtcagcatcgcgcgggcattgatgaacggtggtcaggtaattcttgccgatgaaccaaccggcgcactggacagccattctggcgaagaggtgatggcgatcctgcatcagctgcgcgatcgtgggcatacggtgattatcgtcacccacgatccgcaggtcgctgctcaggccgagcgggtgatcgaaattcgcgacggcgaaattgtgcgcaatcctcccgccattgaaaaagtgaatgttactggcgggacggaacctgttgtcaacacggtgtctggctggcggcagtttgtcagcggttttaacgaggcgctgacgatggcatggcgggcgctggcagcgaataaaatgcgtactttactgaccatgctggggattattatcggtattgcgagcgtggtttccattgtcgtggtgggtgacgccgccaaacaaatggtgctggcggatattcgttctattggtacgaatactattgatgtctatcccgggaaagattttggcgatgacgatccgcaatatcagcaggcgctgaagtacgacgacttaatcgccatccaaaaacaaccgtgggtcgccagtgccacacctgccgtcagccaaaacctgcgcctgcgttataacaatgttgatgttgctgccagtgccaatggcgtgagcggcgattattttaatgtctatggcatgaccttcagtgaaggaaacacctttaatcaggagcagctgaacggtcgtgcgcaggtcgtggttctcgacagtaatactcgccgccagcttttcccccataaagcagatgtggttggcgaggtgattctggtcggcaatatgcccgccagagtcattggtgtggcggaagaaaaacagagcatgtttggtagcagtaaagtgctgcgtgtctggctaccttacagcacgatgtccgggcgagttatgggccagagctggcttaactccattactgtcagggtgaaagaaggatttgacagcgccgaggcggaacagcaactcacgcgtttacttagtctgcgccacggaaagaaggatttctttacctggaacatggacggcgtcttgaaaactgttgaaaagaccacacgtactttacaactgtttctgacgctggtggcggtgattagcctggtggtgggcggtattggtgtaatgaatattatgctggtgagtgtgaccgagcggacgcgggaaattggcattcgcatggctgtaggtgcgcgagcaagcgatgttttgcaacagttcctgatcgaagccgtactggtttgcctggtcggtggcgcgttgggaataacactgagtctgttaattgctttcaccttgcagcttttcttacccggctgggagattggttttagtccgttggcgctgctgctggcgtttctctgcagcacggtcaccgggattttatttggctggttacccgcacgaaatgcggcacgactggatccagtagatgctctggcacgagagtaatttttgagataaaaatgccagccgatcgggctggcattttgcctttaggatgtacacaatgagacagaagagttatgcgactgccgcttctacttcgacgggcacaataacactggcgtgattgccttttggcccctggtggacatcaaactgaacggattgtccagcttttagcgttctgtaaccatccatctgaatggtggaataatgagcgaaaatatcttcgccgccgccttcagggcagatgaaaccaaaccctttggcattgttgaaccacttaacagtacccttttccatgcttcgacatccttcgcaaatcttatacaagtaagatggaataaaccggggtcagagagggggctgttcaaaacctcgccaactctagaaatacaatttagagaattagggcgagccgtcaagcatttgacaggggacaaggggcaggtatgaatcaaaaatttgaagcagttaacgctattgacaggaatgtgacagatgtcgctgatgccaacgatagatgatagttatctatcatgtggagtagattggtcaggcaaataagctcttgtcagcggcagggcgttctgccgataaccgtaaccgaagatgataactgacaatgggtaaaacgaacgactggctggactttgatcaactggcggaagaaaaagttcgcgacgcgctaaaaccgccatctatgtataaagtgatattagtcaatgatgattacactccgatggagtttgttattgacgtgttacaaaaattcttttcttatgatgtagaacgtgcaacgcaattgatgctcgctgttcactaccaggggaaggccatttgcggagtctttaccgccgaggttgcagaaaccaaagtggcgatggtgaacaagtacgcgagggagaatgagcatccattgctgtgtacgctagaaaaagcctgaatgcaggcataaaaattgggggaggtgcctatgctcaatcaagaactggaactcagtttaaatatggctttcgccagagcgcgcgagcaccgtcatgagtttatgaccgtcgagcacttgttactggcgctgctcagtaacccatctgcccgggaggcgctggaagcgtgttctgtggatttggttgcgctccgtcaggaactggaagcctttattgaacaaaccacacccgttctgcctgccagtgaagaggagcgcgacacacagccgacgctgagttttcagcgtgtactgcaacgtgcggtcttccatgtccagtcctccggtcgcaatgaggttaccggtgcaaacgttctggtcgctatctttagcgaacaggagagccaggcggcatatctgttgcgtaaacatgaagtcagccgtctcgatgtggtgaactttatctctcatggcacgcgtaaagacgagccgacacagtcttctgatcctggcagccagccaaacagcgaagaacaagctggtggggaggaacgtatggagaatttcacgacgaacctgaatcagcttgcgcgcgtgggcggaatcgacccactgattggtcgtgagaaggagctggagcgtgctattcaggttctctgccgtcgccgtaaaaacaacccgctgctggtgggggaatctggtgtcggtaaaaccgcgattgcggaaggtcttgcctggcgaattgttcagggcgatgtgccggaagtgatggctgactgtacgatttactctctcgatatcggttctctgttagcgggcacaaaatatcgcggcgactttgaaaaacgttttaaagcgttgctcaagcagctggagcaggacactaacagcatcctgtttattgatgagatccacaccattatcggtgcgggtgcagcgtctggtggtcaggtcgatgcggctaacctaatcaaaccgttgctctccagcggtaaaattcgtgtaattggtagcacaacctatcaggagttcagcaacattttcgagaaagaccgtgctctggcgcgtcgcttccagaaaattgatattactgaaccgagcatcgaagaaactgttcaaatcatcaatggcctgaaaccgaagtatgaagcgcaccacgacgtgcgttataccgcaaaagcggtgcgtgcggcggtagagctggcggtgaaatacattaacgatcgtcatctgccggataaagccattgatgttatcgacgaagcgggcgctcgcgcacgcctgatgccggtaagcaaacgcaagaaaaccgttaatgtggcggatattgagtccgtggtggcccgtattgcacgcattccagagaagagtgtttctcagagtgatcgtgataccctgaaaaacctcggcgatcgcttgaaaatgctggtcttcggtcaggataaagccattgaggcgctgactgaagccattaagatggcgcgtgcaggtttaggtcacgaacataaaccggttggtagcttcctgtttgccggccctaccggggtcgggaaaacagaggtgacggtacagcttagcaaagctttgggcattgagcttctgcgctttgatatgtccgagtatatggaacgccataccgtcagccgtcttattggtgcgcctccgggatacgttggttttgatcagggcggtttgctgactgatgcggtcatcaagcatccacatgcggtgctgctgctggacgaaatcgagaaagcgcacccggacgtgttcaatattctgttgcaggtgatggataacggtacgctgaccgataacaacggacgcaaagcagacttccgtaacgtggtgctggtgatgaccaccaacgccggggtacgggaaactgagcgcaaatccattggtcttatccaccaggataacagcaccgatgcgatggaagagatcaagaagatctttacaccggaattccgtaaccgtctcgacaacattatctggtttgatcatctgagtaccgacgtgatccatcaggtggtggataaattcatcgtcgagttgcaggttcagctggatcagaaaggtgtttctctggaagtgagccaggaagcgcgtaactggctggccgagaaaggttacgaccgggcaatgggcgctcgtccgatggcgcgtgtcatccaggacaacctgaaaaaaccgctcgccaacgaactgctgtttggtagcctggtggacggcggtcaggtcaccgtcgcgctggataaagagaaaaatgagctgacttacggattccagagtgcacaaaagcacaaggcggaagcagcgcattaatctgattgttaggtaggttggtcaagtccgtaatctcgaaagaggttacggactttttgtttatggggtggaggaggttcagaccctttttttaatgatgatggtaagttgttgataattagtgctgcgggaaggtaaggataaaaaagggtgctgcaggagaatgggatggttttgctttattaacaacgggctaaacgtgtagtatttgagttcactgccgtacaggcagcttagaaattcacaggtaacatactccacccgcccaccatgttcactgccgtacagacagataaaatgcgaaaaaaaagctcgcactttcgtacgagctcttctttaaatatggcggtgagggggggattcgaacccccgatacgttgccgtatacacactttccaggcgtgctccttcagccactcggacacctcaccaaattgttttgctaccaaacctcatgggtggcaacggggcgctactatagggagttggagtaaaacggtcaagaagaattttaatgataattattgtttgctcatactgtaaacaagttgtgcagtatatctacatcgagacaagttacggacttatacttccaaagtacttcatacatatcacaaaataaaaaggccggttaaaccgaccttttactcgttctttctcttcgcccatcaggcggtaaaacaatcagcgactacggaagacaatgcggcctttgctcaggtcgtacggggtcagttcaacagtcactttgtcgcccgtcaggatgcggatgtagtttttgcgcattttaccggagatgtgtgcagtaaccacgtgaccgttttctaactctacgcggaacatggtattaggcaacgtttcaagaacggtaccttgcatttcaatattgtcttctttggccatctaatcctctggggtatcactaccgtaatttgaaccggcaagataatgccgaagttctgtaaataagtaaagatttgcgcgctaaatcgcaacaaacaggttcggcacattactccgaaaacacacggctaagccgcaccaaaagcgcaacgtataagggagcggtgagataaacgatgggcgttacctgacgcgaaaaattccttatcggcagcggggtaatgagcgtaaccaactctgcgaccgcaattataacactctggggagaaatgtgccgaaaacattcattcttgtggactaaacaagcatcgtggtacccagaaattattcggcaatcgtccgaggcgcatttgattgagataattaaggtaatcccggcggggaatttcgcaggcaccaaggcttgctgtgtgatcgttaaggacctggcagtcgataagcttaccgccatgaccgataaattcctcacagaataccagaagcgccgttttagacgcattttccatccggctgaacatggactcgccacaaaatagcgttccctgggccacgccgtacataccgccgacaagctcatcttcacgccagacttcaatggagtgggcatggccgagttcgtgaaggcgatggtaggcttcgaccacgccacgcgtgatccaggttccttcttcgcgatcgctggcacagccttcaatgacctgaccaaaagcgtaattcatcgtgacacgataggggctgcgtttatgaaatcgcttcatactacggctgatatgcagactttctggccatagcaccgcgcggggatcggggctccaccagaggatggggtcgcctggagaaaaccacggaaaaataccacgctggtaagccattaacaggcgcgcagggctaagatcgcccccaagtgccagcaggccgttaggctcacgtaatgcgccttccggggaagggaaggctatactatggcgagaaagctgaaccaggcgcatgaccgcaaaactccacgcaagtcggatcgttcaataatagcttacaaaccctgcttgaactggtaataacgcccctgtctggcaagcagttctgcgtgagtaccttgctcaataatttgcccgttgtccatcactattatttgttggaaacgagagagtccgcgaagtcgatgggtgaccattaacaccgttttctcacgcatcatttctgcaagcaattcaaggatctggctttcggttgtggcatctaagccttcggtaggttcatccagcaacaccagtggcgcatcatgtaacagcgcacgggcgatagccagacggcgcagttcaccaccggagagctggcgtccgccttcacctaaccaactgttgagacctgcatcctcgagcagcttttccaggccaacgcgacgcaagatctcgctcagagcctcatcactactgccagggctggcgagtaaaagattatcacgcagcgtggcgctaaacagatgcactcgctgaggaacaacgctgatggtctgtcgtagagccgcttcattcaggctggctatggggctatcgttaagcaaaatctcgccctgttgcgggtcccatgcgcgggtcagctgttgtaacagtgtacttttgccgcatccggttcgcccgagaatcgctatatgttccccggcgtttacctgaagagaaatccctttaagtgcctgttgagattgctccggataagtgaactgaacatcccgtaacgtcaggctaacgcgatcggcaacacgagtttgggtatcaggaaaggtgacctccggtttttgatccgttaagtcagagatacgtacggcagaggcaatgacttgccccagatgctgaaatgcacccgttactggtgccagtgcttcaaacgcggctaacgcgcagaagacaaacagggcaattaacgcgccgggttgagcattgccgccaacgccgccagacgccatccacagcatcaggatcaccgctaacgcgccaatgagcagcattatcgcttggctcaatgcggtcagttcagattgacggcgttgcgcttccagccattgaatttctgtattctctagttgcgtgcgataacgatcgctggcaccaaaaatggtcagctcagcttgcccttgcagccaggccgtcagttgttggcgatactgtccgcgaagatgagtcagattttgcccggtgctttttcccgcacgataaaacagcggtggcatcaggaaaagcgtcagtaacataatgccgcccagcgtaaaggcgagggtgaaatcaaggaaacttaacccgattgtcaccaccataatcaccacaaaagcgcccaccagcgggctgataacgcgcaggtaaagatgatcgagcgtatcaacatccgccaccacgcgattgagcaattcgccctgacgatagcgcgccagtccggcaggggagaggggcagcaatttgctgaaggtgtaaatgcgcagatgctgcaacacgcggaaagtcgcgtcgtgacttaccagacgttcaaaatagcgcccggcagtacgggtgattgctgcgccacgcacgcccgcagcgggtagcatatagttgaagctgtacagtccggcaacccccgcaaccgcactggcgctgaggaaccagccggaaagtgtcaacagaccgatactggcgagcagcgtcacaattgccagcacaataccaagacttaacatccatttatgacgtttatacagtgccagatagggtagcaaagcgcgcatttaaatctcctcctgacgatgggccagtaatgtggcgaatgggccaccagccacacttaattccgcgtaacgtccttgctcaataatccggccatcctgcataacccaaatgacatcccagtcagcaagatcttctaactggtgggtgaccattaacgttgtctggcgcagagaggcggcattcagcgcctccattacgcgctgttcactgtgagcatcaaggctggcagcgggttcatccaacagtaataggctacagggatttagtaacgcacgggccaccgccacgcgctgcgcctgccccacggaaaggcgggcagcctggtcgccaacaggcgtatcaacgccttgtgggaggagcggtagaaactcgctgacccaggcgttatccagcgctgcttgtaattcttgttcgctggcatcaggtcgcgccagtagtacgttatcccgcaatgttgctgccggtaattgtgggttttgcccaacccaggagagatgtttacgccaactttctggacttaaatcgcgtaattctatcccgttgattcgtaggcttccctgataactgagaaaaccagaaagcgcgttcagcagactgcttttaccactaccgctgcgaccaaccaacaccgcacgttggcctgctggcaaagtaaagttcagcggtccggccagcgttttaccttccgggctcgtgataaacagctcctcggcctcaatggtcaccggatcggtgcttgctaattccgcctcaccacgttgcggatgggcgagcggggtttccataaacgttttcagactgtcagctgcgccaacagcctgggctttagcatgataaaacgtaccgagatcgcgtaatggctggaaaaactctggcgcaaggatcagggccagaaaacccgcagccagcgtcacaccggtatcgtagtgaccaaaatccagctcgccgagataggaaaaaccaaagtagaccgccaccagagcaatactcaggctggtaaaaaattcgagaatgccggaggataaaaacgccagccgtagcacttccattgtccgttggcggaaatcttcgctagcagaacgaatactttcaatttcagcttcaccacgaccaaaaatacgcaatgtttccatgccgcgcaggcgatcgaggaaatgcccacttaagcgagcaagagcgagaaagttacgtcggttagcatcggcagcccccattccaaccagcgccataaacaacggaattaacggtgcagtgcccagcagaatgagcgccgcagcccagttagaggggaagattgccaccacaatcagcaacggcacgctcactgccagcgccatttgcggcagatagcgtgcatagtaatcatgcatatcgtcaatttgctcgagtaccagcgtcgcccagctccccgcaggtttaccctgaatccacgctggccctgcttgttgcagacggtcgagaacctgacggcggatggcaaagcggatatgctgcccggcgtgataacccacccgttcgcgtaaccagaccacccatgcgcgcagtacaaaggtcagaaccagtaacgtaaagggaagcagcagggcttcacggggaatattctccataatcatatgttgcagaattcgcgccatgaaccaggcctgggcaatgatcaatatgccgctcacaaagcccagcagacgagaaatattcagccaacgttgggagatgacgctttgctgttttaaccagcgggttaactctttttgacgagatttattcattgcacgcttagcaggtgagttatcagaattatttgcagagcaatgttacaacggggaaaaaataaaggcgacccatagtcgcatggtgtcgccttctttacttttgttactgatttgtaaaattattttgcgtcagctaaaccatcgaggtagcgttccgcatcaagtgctgccatgcagcctgtaccggcgctagtaatggcctggcgataaatgtgatccatcacgtcgcctgcggcaaagacgccaggaatgctggtctgggtggcattaccatgaataccgctctgtactttgatgtagccgttttccagttccagctgcccttcgaaaatcgcagtattcgggctgtgaccgatagcaacaaacagaccggcaacgtcgagactctcgatgttatcgctgttttgcgtatcgcgcagacgaacgccagtgacacccatttgatcgccggtcacttcttccagcgtacggttggtgtgcagaatgatgttgccgttctccactttatccatcaggcgcttaatgaggattttttccgcgcggaaaccgtcacggcggtgaatcagatgcacttcgctagcgatgttagacagatacagcgcctcttcaaccgcggtattgccgccgccgatgaccgcaactttctggttgcgatagaagaaaccgtcgcaggttgcacaagcagaaaccccacggcctttaaaggcttcttcagagggcaggccgagatagcgtgcagaagctccggtggcaataatcagcgcgtcgcaagtgtattcgccgttatcgccattcagacggaacggacggttttgcagatccaccttgttgatatgatcaaaaatgatctcagtttcaaacttggtggcatgttcgtgcatgcgctccattaataacggaccggtcagatcgtttggatcgccaggccagttttccacttccgtggtggtggtcagttggccgcctttttccatgccggtaatcagcacaggttgcaggttggcgcgcgccgcgtagacagcagcggtgtatcccgccgggccactacccaggataagcagtttactgtgtttggtcgtgcccatgagatccccatagttgttggcagacaatgggcaggattgtagggaatttacagacgtaaaaaaagagtatgacgattttgttaacaatttgtgcaatcggcagcatcgataagcaggtcaaattctcccgtcattatcacctctgctacttaaatttcccgctttataagccgattaaatgatgaataaacgcccctgttaatgaatatctggcatgttgtactaaaaatcgatgttttgctttgacaatcccctggtgttttgcgaaaacattcgaggaagaaaaaaaacagtattcttatatgcgcataaccatgcatgtaaataccatgtttaccgtgctagtgaaatctacgtatggcgtggacagacgccattcgtgatgtcgatagctgccacaaggcaacggtcttctcaccgtagacccaggcattgcgcgccgtgaatcttcatgatttcggtctatcgtgacgggtagcgactctgaacagtgatgtttcagggtcagacaggagtagggaaggaatacagagagacaataataatggtagatagcaagaagcgccctggcaaagatctcgaccgtatcgatcgtaacattcttaatgagttgcaaaaggatgggcgtatttctaacgtcgagctttctaaacgtgtgggactttccccaacgccgtgccttgagcgtgtgcgtcggctggaaagacaagggtttattcagggctatacggcgctgcttaacccccattatctggatgcaagtcttctggtattcgttgagattactctgaatcgtggcgcaccggatgtgtttgaacaattcaataccgctgtacaaaaacttgaagaaattcaggagtgtcatttagtatccggtgatttcgactacctgttgaaaacacgcgtgccggatatgagtgcctaccgtaagttgctgggggaaaccctgctgcgtctgcctggcgtcaatgacacacggacatacgttgttatggaagaagtcaagcagagtaatcgtctggttattaagacgcgctaacacggaacaggtgcaaaatcggcgtattttgattacactcctgttaatccatacagcaacagtactggggtaacctggtactgttgtccgttttagcatcgggcaggaaaagcctgtaacctggagagcctttcttgagccaggaatacattgaagacaaagaagtcacattgacaaagttaagtagcggccgccgccttctggaggcgttgctgatccttattgtcctgtttgccgtctggttgatggctgccttactaagctttaaccctagcgaccccagctggagccaaacggcctggcatgaacctatccataatttaggtgggatgcccggtgcgtggttggcagatacgctgttctttatttttggcgtgatggcttacaccattcccgtcattattgtcggcggttgttggtttgcctggcgtcatcagtccagcgacgaatacattgattattttgccgttagcctacgcatcattggcgttttggcgctcatccttacctcctgtggtctggcggcaatcaacgctgacgatatctggtattttgcctccggtggcgtcattggcagcttactaagcactacgctacaaccactgctacacagtagcgggggaactattgcgctgctctgcgtttgggcagcgggcctgacgttgttcaccggttggagttgggtgaccattgctgaaaaactcggcggctggattttaaacattctcaccttcgccagtaatcgtacccgtcgcgatgatacctgggtcgatgaagatgagtatgaagacgacgaagagtatgaagatgaaaatcacggcaaacagcatgaaagtcgccgtgcccgtattcttcgcggcgcgctagcgcgtcgtaaacggttggcggaaaaattcattaatccgatggggcggcaaacagacgctgcgttgttctccggtaagcggatggatgatgacgaagagattacctacactgcacgcggtgtggctgccgacccggacgacgtcctatttagcggcaatcgtgcaacgcagccagaatatgacgaatacgatccattattaaacggtgcgccaattaccgaacctgtcgctgtagcagctgctgctaccacggcgacacaaagctgggctgcgccggttgaacctgtgactcagacgccgcctgttgcctctgttgatgttccacctgcgcaacctacagtagcctggcagcctgtaccgggtccacaaacgggagagccggttattgctcctgcaccggaaggttacccacagcagagtcaatatgcgcagcctgcagtgcaatataatgagccgctgcaacaaccagtacagccgcagcagccgtattatgcacctgcagctgaacaacctgcgcaacagccgtattatgcccctgcgccagaacaaccggtggcaggtaacgcctggcaagccgaagagcagcaatccacttttgctccacagtctacataccagactgagcaaacttatcagcagccagccgctcaggagccgttgtaccaacagccgcaacccgttgaacagcagcctgttgtggagcctgaacccgttgtagaagagacaaaacccgcgcgtccgccgctttactactttgaagaagttgaagagaagcgagcccgtgaacgtgaacaacttgcggcctggtatcaaccgattccagaaccggttaaagaaccagaaccgatcaaatctagcctgaaagcaccttctgttgcagcagtacctccagtagaagccgctgccgctgtttccccgctggcatctggcgtgaaaaaagcgacactggcgacgggggctgccgcaaccgttgccgcgccagtcttcagtctggcaaatagcggtggaccgcgtcctcaggtcaaagaggggattggtccgcagttgccacgaccgaaacgtatccgcgtgccaactcgtcgtgaactggcgtcttacggtattaagctgcccagtcagcgtgcggcggaagaaaaagcccgtgaagcccagcgcaatcagtacgattctggcgatcagtacaacgatgatgaaatcgatgcgatgcagcaggatgaactggcacgtcagttcgcccagacacagcagcaacgctatggcgaacagtatcaacatgatgtgcccgtaaacgcagaagatgcagatgctgcggcagaggctgaactggctcgtcagtttgcgcaaactcaacaacaacgttattccggcgaacaaccggctggggcgaatccgttcagcctggatgattttgaatttagcccaatgaaagcgttgctggatgatggtccacacgaaccgttgtttacgccaattgttgaacctgtacagcagccgcaacaaccggttgcaccgcagcagcaatatcagcagccgcaacaaccagttccgccgcagccgcagtatcagcagccacaacagccggttgcgccgcagccacaatatcagcagccgcaacaaccggttgcgccacagcagcaatatcagcagccgcaacaaccggttgcgccgcagcagcagtatcagcagccacaacagccagttgcgccacaaccgcaggataccctgcttcatccgctgttgatgcgtaatggcgacagccgtccgttgcataaaccgacgacgccgctgccttctctggatttgctgacaccgccgccgagcgaagtggagccggtagatacctttgcgcttgaacaaatggctcgcctggtggaagcgcgtctggctgatttccgtattaaagccgatgtcgtcaattactctccggggccggttatcactcgctttgaattgaacctggcaccgggcgtaaaagcggcgcgcatttctaacttgagtcgggaccttgcccgtagtcttagcacggtggcggtgcgtgtcgttgaagttattcctggcaaaccctatgtaggtctggagttaccgaataaaaaacgacaaaccgtttatctgcgcgaagttttggataacgccaaattccgcgataatccgagcccattaaccgtggtgctgggtaaagatatcgccggtgagccggtggttgccgatctggcgaaaatgccgcacttgttggttgcggggactaccggttccggtaaatctgtcggtgtgaacgcgatgatcctgagcatgctttataaagcacagccagaagatgtgcgtttcatcatgatcgacccgaaaatgctggagcttagcgtttatgaaggcattccgcatctgttaacggaagtcgttactgatatgaaagatgccgccaacgcgctgcgctggtgtgttaacgagatggagcgtcggtataaactgatgtctgcgctgggtgtgcgtaatctggcgggttataacgaaaaaattgctgaagccgatcgcatgatgcgtccgattccagacccgtactggaagccgggtgacagtatggatgcccagcatccggtgctgaaaaaagaaccatacattgtggtgttggttgacgaatttgccgacctgatgatgacggtaggtaaaaaagtggaagagctgatagcacgtctggcgcaaaaagcccgtgccgcgggtatccacctcgtactggcaactcagcgtccaagcgttgatgttattactggtctgattaaagcgaatattccgacccgtatcgcctttaccgtatccagtaagattgacagtcgtaccattcttgatcaggctggcgcggaaagtctgctgggtatgggggatatgctctactctgggccgaactccacgttgccggtacgtgtccatggtgcttttgttcgcgatcaggaagttcatgccgtggtgcaggactggaaagcgcgtggtcgcccacagtatgttgatggcatcacctccgacagcgaaagcgaaggtggtgcgggtggtttcgatggcgctgaagaactggatccgttgttcgatcaggcggtgcagtttgtcactgaaaaacgcaaagcgagtatttctggcgtacagcgtcagttccgcattggttataaccgtgcagcgcgtattatcgaacagatggaagcgcaggggattgtcagcgaacaggggcacaacggtaatcgtgaagtgctggccccaccgccgtttgactaactaatgcatcgtatgccggataaggcgcggtagcgtcgcatccggcactctatcaactgaaaattcagtattttcttctttcctcaagctgattattagcctggaatagagagtagagggaactcccgatcgggagtgacgtaatttgaggaataatgatgaaaaaaattgccatcacctgtgcattactcagtagcttagtagcaagcagcgtttgggctgatgccgcaagcgatctgaaaagccgcctggataaagtcagcagcttccacgccagcttcacacaaaaagtgactgacggtagcggcgcggcggtgcaggaaggtcagggcgatctgtgggtgaaacgtccaaacttattcaactggcatatgacacaacctgatgaaagcattctggtttctgacggtaaaacactgtggttctataacccgttcgttgagcaagctacggcaacctggctgaaagatgccaccggtaatacgccgtttatgctgattgcccgcaaccagtccagcgactggcagcagtacaatatcaaacagaatggcgatgactttgtcctgacgccgaaagccagcaatggcaatctgaagcagttcaccattaacgtgggacgtgatggcacaatccatcagtttagcgcggtggagcaggacgatcagcgcagcagttatcaactgaaatcccagcaaaatggggctgtggatgcagcgaaatttaccttcaccccgccgcaaggcgtcacggtagatgatcaacgtaagtaaaggcacctgagtgagcaatctgagcctcgattttagcgataatacttttcaacctctggccgcgcgtatgcggccagaaaatttagcacagtatatcggccagcaacatttgctggctgcggggaagccgttgccgcgcgctatcgaagccgggcatttacattctatgatcctctgggggccgccgggtaccggcaaaacaactctcgctgaagtgattgcccgctatgcgaacgctgatgtggaacgtatttctgccgtcacctctggcgtgaaagagattcgcgaggcgatcgagcgcgcccggcaaaaccgcaatgcaggtcgccgcactattctttttgttgacgaagttcaccgtttcaacaaaagccagcaggatgcatttctgccacatattgaagacggcaccatcacttttattggcgcaaccactgaaaacccgagctttgagcttaatagcgcactgctttcccgtgcccgtgtctatctgttgaaatccctgagtacagaggatattgagcaagtactaactcaggcgatggaagacaaaacccgtggctatggtggtcaggatattgttctgccagatgaaacacgacgcgccattgctgaactggtgaatggcgacgcgcgccgggcgttaaatacgctggaaatgatggcggatatggccgaagtcgatgatagcggtaagcgggtcctgaagcctgaattactgaccgaaatcgccggtgaacgtagcgcccgctttgataacaaaggcgatcgcttttacgatctgatttccgcactgcataagagcgtacgtggtagcgcacccgatgcggcgctgtactggtatgcgcgaattattaccgctggtggcgatccgttatatgtcgcgcgtcgctgtctggcgattgcgtctgaagacgtcggtaatgccgatccacgggcgatgcaggtggcaattgcggcctgggattgctttactcgcgttggcccggcggaaggtgaacgcgccattgctcaggcgattgtttacctggcctgcgcgccaaaaagcaacgctgtctacactgcgtttaaagccgcgctggccgatgctcgcgaacgcccggattatgacgtgccggttcatttgcgtaatgcgccgacgaaattaatgaaggaaatgggctacgggcaggaatatcgttacgctcatgatgaagcaaacgcttatgctgccggtgaggtttacttcccgccggaaatagcacaaacacgctattatttcccgacaaacaggggccttgaaggcaagattggcgaaaagctcgcctggctggctgaacaggatcaaaatagccccataaaacgctaccgttaatgttatcgttgcggtaatgttgttactgtatccctgtggtcgcaggctgtggccacatctcccatttaattcgataagcacaggataagcatgctcgatcccaatctgctgcgtaatgagccagacgcagtcgctgaaaaactggcacgccggggctttaagctggatgtagataagctgggcgctcttgaagagcgtcgtaaagtattgcaggtcaaaacggaaaacctgcaagcggagcgtaactcccgaagcaaatccattggccaggcgaaagcgcgcggggaagatatcgagcctttacgtctggaagtgaacaaactgggcgaagagctggatgcagcaaaagccgagctggatgctttacaggctgaaattcgcgatatcgcgctgaccatccctaacctgcctgcagatgaagtgccggtaggtaaagacgaaaatgacaacgttgaagtcagccgctggggtaccccgcgtgagtttgactttgaagttcgtgaccacgtgacgctgggtgaaatgcactctggcctcgactttgcagctgcagttaagctgactggttcccgctttgtggtaatgaaagggcagattgctcgcatgcaccgcgcactgagccagtttatgctggatctgcataccgaacagcatggctacagtgagaactatgttccgtacctggttaaccaggacacgctgtacggtacgggtcaactgccgaaatttgctggcgatctgttccatactcgtccgctggaagaagaagcagacaccagtaactatgcgctgatcccaacggcagaagttccgctgactaacctggtgcgcggtgaaatcatcgatgaagatgatctgccaattaagatgaccgcccacaccccatgcttccgttctgaagccggtagttatggtcgtgacacccgtggtctgatccgtatgcaccagttcgacaaagttgaaatggtgcagatcgtgcgcccagaagacagtatggcggcgctggaagagatgactggtcatgcagaaaaagtcctgcagttgctgggcctgccgtaccgtaaaatcatcctttgcactggcgacatgggctttggcgcttgcaaaacttacgacctggaagtatggatcccggcacagaacacctaccgtgagatctcttcctgctccaacgtttgggatttccaggcacgtcgtatgcaggcacgttgccgcagcaagagcgacaagaaaacccgtctggttcataccctgaacggttctggtctggctgttggtcgtacgctggttgcagtaatggaaaactatcagcaggctgatggtcgtattgaagtaccagaagttctgcgtccgtatatgaacggactggaatatattggctaatacccaatttttctgaatctaaaaagcgcctgcgggcgctttttttgtctccctttgataccgaacaataattactcctcacttacacgtaatactactttcgagtgaaaatctacctatctctttgattttcaaattattcgatgtatacaagcctatatagcgaactgctatagaaataattacacaatacggtttgttactggaatcaatcgtgagcaagcttgagtgagccattatgaaaacgaaaatccctgatgcggtattggctgctgaggtgagtcgccgtggtttggtaaaaacgacagcgatcggcggcctggcaatggccagcagcgcattaacattaccttttagtcggattgcgcacgctgtcgatagcgccattccaacaaaaagtgacgaaaaggttatctggagcgcctgtacagttaactgtggtagtcgctgcccgctacgtatgcacgtcgtggacggtgaaatcaaatatgtcgaaacggacaataccggcgatgacaattacgacggcctgcaccaggttcgcgcctgcctgcgtgggcgttccatgcgtcgccgtgtctacaatccggaccgcctgaaatatccgatgaaacgagtcggggcgcgcggtgaaggcaaattcgagcgcattagctgggaagaagcctacgacatcatcgcgaccaatatgcagcgcctgatcaaagagtacggcaacgagtctatctatctgaactatggcaccggtacgctgggcggcaccatgacccgctcctggccgccgggaaataccctggtcgcgcggctgatgaactgctgcggcggctatctgaaccattacggcgactactcctccgcgcaaattgcggaaggtttgaactatacctacggcggctgggcagatggcaacagcccgagcgatatcgaaaacagtaagctggtagtgctgtttggtaataaccctggcgaaacgcgaatgagtggcggtggggtgacttactatcttgaacaggcacgccagaaatctaatgcccgcatgatcatcatcgatccgcgctataccgacaccggtgccgggcgcgaagatgagtggatccctattcgtccgggaacagatgccgcactggttaacggtctggcgtacgtcatgatcactgaaaacctggtggatcaggcattcctcgataaatattgcgttggctacgatgagaaaaccctgccagccagtgcgccgaaaaatggccactataaagcttatattctgggtgaagggccagatggcgtggctaaaacgccggaatgggccagccaaatcactggtgttccggcagacaaaatcatcaaattggctcgtgaaatcggtagtaccaaaccggcgtttatcagccagggatggggcccgcagcgtcacgctaacggtgaaatcgcaacccgtgctatcagcatgctggcgattctgaccggtaacgttggtattaacggaggcaacagcggcgcgcgtgaaggtagttacagcttaccgtttgtccgtatgccgaccttggaaaacccgatccagaccagcattagcatgtttatgtggaccgatgccattgaacgtggcccggaaatgacggcgctgcgtgatggtgtacgcgggaaagataagctggatgtgccgatcaaaatgatctggaactatgccggtaactgcctgattaaccagcattctgaaatcaaccgtacccatgaaatccttcaggatgataagaagtgcgagctgattgtggttatcgactgccacatgaccagtagcgcgaaatatgctgacatcctgctgcctgactgcaccgcttccgaacagatggactttgcgctggatgcatcctgcgggaatatgtcttacgtgattttcaacgatcaggtgattaaaccgcgctttgaatgtaagaccatctatgaaatgaccagcgaactggcaaaacgtcttggcgttgagcaacagtttactgaaggccgtacccaggaagagtggatgcggcatctgtatgcccagagccgggaagcgattcctgaactgccaacgtttgaagagttccgcaagcaggggatctttaaaaagcgcgacccacaagggcatcacgttgcttataaagccttccgtgaagatccgcaggcaaacccactgactacgccaagcggcaaaattgagatttatagccaggcgctggctgacattgccgctacctgggaattgcctgaaggcgatgtgatcgatccactgccgatctacacgccgggctttgaaagttatcaggatccgctgaacaaacagtatccgctgcagcttacaggtttccactataaatctcgcgttcacagtacttacggcaacgttgatgtgctgaaagcggcttgccgtcaggaaatgtggatcaacccgcttgatgcccaaaaacgcggtatccacaacggcgataaagtcaggatctttaacgatcgtggtgaggttcatattgaggcgaaagtgacgccacgaatgatgccgggtgtggtcgcactgggtgaaggtgcctggtatgacccggatgcaaaacgtgtcgataagggtggttgtattaacgtactgaccactcaacgtccgtctcctctcgctaaggggaatccgagtcatacaaaccttgttcaggttgaaaaggtgtaaggagtaaccgatgacaacccagtatggattttttattgattccagccgttgcaccggttgcaaaacctgcgagctggcctgtaaagactacaaagatttgacgccagaagtcagcttccgccgcatttatgaatatgctggcggcgactggcaggaagataacggtgtctggcaccagaacgtgtttgcctactatctgagcattagttgtaaccactgcgaagatccggcttgtactaaagtctgcccgagcggtgcgatgcataaacgtgaagatggttttgttgtggtcgatgaagatgtgtgcattggctgccgctactgccatatggcttgcccgtatggcgcaccgcaatataacgaaacgaaaggccatatgaccaaatgcgatggttgttatgaccgtgttgcggagggtaaaaagccgatctgtgttgaatcttgtccgctgcgggcgctggatttcggccctatcgacgagctgcgtaaaaaacatggcgatctggcggccgttgcgccgttgccgcgagctcactttaccaaaccgaatattgtgatcaaacccaatgccaatagccgcccgaccggggataccactggctatctggcaaacccgaaggaggtgtgagatgggaagtggatggcatgaatggccgctgatgatcttcacggtcttcgggcaatgtgtagcaggtggttttatcgttctggctttggcgctgctcaaaggcgacctgcgagcagaagcccagcagcgtgttatcgcctgcatgtttggtttatgggtgctgatgggcattggctttatcgcctctatgctccatcttggtagtccaatgcgcgcttttaacagcctcaaccgggtaggggctagtgcactcagtaacgaaatcgccagcggtagcatcttttttgccgtaggcggcatcggctggttgctggcaatgctgaaaaagctgagtccggcattgcgtacgctgtggctgatagtgacgatggttcttggcgtcatctttgtctggatgatggtgcgtgtgtataacagcattgataccgttccgacctggtacagcatctggacgccgatgggcttcttcctgacgatgtttatgggcggcccgttactgggttacctgttgttgagtctggctggcgtcgatggctgggcgatgcgtctgctgccagcaatttctgtactggcactggtagtgagtggcgtggtgagtgtgatgcagggcgcagagctggcgactattcatagttctgtgcagcaggccgcagcgctggtgccggactatggtgcgctgatgtcctggcggatcgtgcttttggccgttgccctgtgcttgtggattgcaccacagctaaaaggttatcagcctgcggttccgctactttctgtaagtttcattctgcttctggcaggggaattaatcggtcgcggcgtattctatggtttgcatatgaccgtggggatggccgtcgcaagctaatcataacaaccggggtttcggccccggttctcttttatttctgcttcgttaacgtgtcataactggtcatcaaattacgataatcaggaatgtggttagagaacaacgtcgccagtccttcaatatcattacgccagtcgcgatgcagctcgcacgccacgccgaaccatgtcatcaattgcgcaccagcttggctcaagcgatcccatgcgctatgccgggtaatttcattaaaggtcccactcgcgtcagtcacgacaaagacgtcaaacccttcttcaatggcactaagcgccgggaatgccacgcaaacttcggttaccacaccggcaataattaactgttttttacctgtcgctttgacagcttttacaaaatcttcgttatcccaggcgttaatatttcccgggcgagcaatgtaaggtgtatcggggaattgtgctttcagttctggaactaatgggccgttaggaccggtttcaaaactggtggtaagaatagttggtaagttgaaatacttagccaggtcacccagcgccagcacgttatttttaaacttatcgggttcgatatcccgtacaagggaaagtaaaccagcctggtgatcaacaagcaaaacggcagcatcatttttatcaagacgaacatacggtttggtcatcctcttctcctttcgagagtcagtggtacgtctgaaatcgatcagacgcgatgcattgctctgaaagcatagacgggaaatatgagtttgctgtgaccatgaaatttttcgactgaacgaagcgtatgaaatttgtgttagttcaataaaaacaatcagatgagactaatcatctcttcagcattagcgttatgaatgagtaatataaatcgataataccgccgctgggatatcgcgtattttcacccattgacaatgtttttggcggtggcatgatgcgcatgaaatttgaacttcctcacggttttaattcatgtccacgtatacccagcctgtcatgcttttgctgtctggcctgcttttgttgactctggcgattgcggtgttaaatacactcgtgccgctttggctcgcccaggaacacatgtccacatggcaggtaggcgttgtcagcagttcctattttaccggcaaccttgtcggtacattgctgacagggtatgtcattaagcgcattggctttaaccgcagctattatctggcctccttcatttttgccgctggctgtgccggccttggcctgatgattggattctggagctggttggcttggcgttttgtcgcgggcgtcggctgtgccatgatttgggtggttgttgagagcgcgctgatgtgcagtgggacgagtcgtaaccgtgggcgtttgcttgctgcgtatatgatggtttattacgtgggaacgtttttaggccagttactggtcagcaaagttagtaccgagctgatgtccgtattgccgtgggttacaggtttgacgttggcagggatcttaccgctgttgtttacgcgtgtgctgaatcagcaggctgaaaaccatgatagcacgagtattacgagtatgctaaaactccgtcaggcgcggcttggcgtgaatggctgcattatcagtggaatcgttctgggatctctatatggcctgatgccgctgtacctcaatcacaaaggggtgagcaatgccagcattggtttctggatggcggtactggtcagtgcgggtatccttggacaatggccgattggacgtctggcggataagtttggtcgactgctggtgttgcgtgttcaggtctttgtcgtcattctcggcagtatcgcgatgcttagccaggcggcgatggccccagcgttattcatcctcggtgccgctggctttacgctatatccggtggcgatggcatgggcttgcgagaaagttgaacatcatcaactggtggcgatgaaccaggccttactgttgagctatactgtgggaagtctgcttggcccgagttttaccgctatgctaatgcagaatttctccgataatttattgtttatcatgatcgccagcgtaagctttatctatttgctgatgctgctgcgcaacgccggtcatacgccgaaacccgttgctcacgtgtaaatgaattcaagcagagtgtgaacttactgtttcacactctgcttttttgtttcttctatctgacttgctttattccaaattttattcgtttaaaaataaaatgtgcagcaggttataattttgcatttcgctatttccgcacttcttatttgccgcgcataatccctcgttttaccgatgcccctttaattttggcgaaggatttgtctatggctgggaatgttcaggaaaaacagttgcgatggtacaacattgcgctgatgtcttttatcactgtctggggttttggcaacgttgttaataactatgccaaccaggggctggtggttgtttttagttgggtgtttatctttgcactctatttcacaccttatgcgctaattgttggtcagttaggcagcaccttcaaagatgggaagggcggggtcagtacctggattaaacacacgatgggacccggactggcttatctcgccgcgtggacctactgggtggtgcatattccctatctggcacaaaaaccccaggcaattctgattgcgctcggttgggcgatgaaaggcgacggtagcctaatcaaagaatatagtgtcgtagcgttacaggggttaacgctggtgctgtttatcttctttatgtgggttgctagtcgcggtatgaaaagcctgaaaatcgtcggttctgtggcagggattgctatgtttgttatgagtctcctgtatgtggcgatggcggtaaccgcgcctgcaattactgaagtgcatattgcgaccacaaacattacctgggaaacgttcattcctcatatcgactttacctacattaccactattagtatgctggttttcgcggttggcggagcagagaagatttctccttacgttaatcaaacgcgcaacccaggaaaagaatttccaaaagggatgttatgcctggcggtgatggttgcggtttgtgccattctgggcagcctggcgatggggatgatgtttgatagccgtaatatcccggatgacttaatgaccaacggtcagtattacgcctttcagaagctgggcgagtattacaacatgggtaatactttaatggtgatttacgccattgcgaataccctgggacaagtagcggcgctggtattcagcattgatgccccgcttaaagtgctattaggtgatgctgacagcaaatatattccagccagtttatgtcgtaccaacgcttctggtacgcccgttaatggctattttctgaccctggtactggtggcgattctgattatgctgccgactctcggcattggtgatatgaacaatctctataaatggctgttgaaccttaatagcgtagtgatgccgctgcgttatttatgggtatttgttgcatttattgcagtcgttcgcttggcgcagaaatataaaccagaatatgtctttattcgtaataagcctctggcaatgaccgtcgggatttggtgttttgcctttaccgcctttgcctgtttgacggggatcttcccgaaaatggaagccttcactgcagagtggaccttccagttggcgctgaatgttgcaacgccgtttgtgctggtaggattaggactgatattcccgctgctggcgcgtaaagcgaatagtaaataattattgtggtcggtgacgctgactctggcagatctgacccgtttttacataatcgagaaatgcgcgcaagccgcaggacatatactggcggtttggataatagatctggaagcctggacgctctgtgctccagtcttccagtacacattctaaacgaccagtatcaaggtactccttgatctgttcatagagcagatacccgataccagcacccatcaaaacggcctccagttcagcatcaacatcatccagaatgatatttcctgcgacagcaatttccagctcctttgcaaattgccagtggaaaggtttgccgctgggataacgaaaaacaacacattgatgattaagcagatcatgaggatggcggggtttgccatatcttgcaaagtactctggcgttgctgctacacataatttcactggcgggccgatcgccacgctgatcatatctttttcgacgatgcaactaagtcgaacgccagcgtcaaagccctgttggacgatatcgacaagagagtcgtcagttgtgagctcgactttaatatcaggatattcacgtgtgaaaccaaccagtaaagacattaaaaatatacgtgcagctacccgggcggcattgattttgagcgttcctgtcggtgtcagacgaaaatcattcatctcatctaacatgatctgaatttcgtcgaaagctgggcgcaatcgttcatagagattagaacccgcttccgttaagcttacgcttcgggttgtccgattgaataagcgaattttaagacgttgttccagtgttttaatactatggctaatggcggagctggataagcctaactcatcgcccgctgcacgaaagctttgattacgggccacggcaaagaaagtggcaaagtcagacatattcatccgcattagtgaaaatccttcattaactcatcctgaatcatcacgtttacaggattatgccgcctgcgtaaagtgcgctccagaacttaacgtggaggtaaaattatgcagtctgaacgtatttatttggtatgggcccatcctcgtcatgatagtttgaccgcacatattgctgatgcgatccatcagcgggcaatggagcggaaaatacaggtgacggaactcgatttatatcggcgtaatttcaacccagtgatgacgccggaagatgaaccagactggaagaatatggataaacgttattctccagaggttcatcagctttatagtgagctgcttgaacatgacacgttagtggtggtttttcctctctggtggtacagcttcccggcaatgctaaaaggatatattgacagagtatggaataatgggctggcttatggagatgggcacaaattaccattcaataaagttcgttgggtggcgctggttggaggagacaaagaaagttttgtccagatgggctgggaaaaaaatataagcgattatttaaaaaatatgtgcagttatcttggtattgaagatgccgatgtcactttcttgtgtaatacagtggtattcgatggggaagaacttcacgcgagctattatcagagcttattatctcaggtacgggatatggtagatgcactataagatgtgttaaaaacgctgtagcagaatgaagcgcggaataaaaaagcggcaactcaataaagttgccgctttacggggaaattagaacattaccttatgaccgtactgctcaagaatgcctttcacgcgttccatggtctctttcttcggtggtttaacaccgtcgagtttgtactcttcacccattgccacccatttgtgtttgcccagctcgtggtaggggagaagctcgattttctcaacgttgcccatatcacgggtaaattcaccgaggcgatgcgcactatcgtcatcgtcagaccagcctgggacaacaacgtagcggatccacaccttcacatttttgttcgccagatatttagcgaactccagcgtgcggtggttggaaactccaaccagattttggtggatctcgtcgttcatctgtttgagatcgagcattaccaggtcggttacttccagcagttcatcaatcaccggatcgtaacgacgaacaaaaccgttggtgtccagacaggtatgaatgccttcttttttgcaggcgcggaaccagtcacgaacaaactcagcttgcaggattgcttcaccgccggatgcggtaacgccgccgccggaagcgttcataaagtggcgataggtcaccacttccttcatcaaatcttcaacggtaacttctttaccgccatgcgtgtcccaggtgtcgcggttatgacaatacaggcagcgcatcaggcagccctggaaaaaggtgataaagcgaatacctgggccgtctacggttccacaggattcaaaggagtgaatgcgaccaataacactcattgcggtgtttctccagatgtggcccatctgaggccgtgttggtgcgcagctcgaaggctacgtcgagtctgttttggcagtcaccttaaagtatagatagctgacaaaaaaggctctcgcgctaaaaaaggccccactttcgtggagcctttattgtacgctttttactgtacgatttcagtcaaatctaattacatagattgagtgaaggtacgagtaataacgtcctgctgctgttctttagtcaggctgttgaaacgtactgcgtagccagatacacggatggtcagctgcggatatttttccgggttttccatcgcgtcgagcagcatttcacggttcatcacgttaacgttcaggtgctgaccaccttcgatggatgcttcgtggtggaagtaaccatccatcagaccagccaggttggtcttacgaacttcgtcgtctttacccagtgcgttcggaacgatagagaaggtgtaggagataccatctttagcgtaagcaaacggcagtttagcaacggaagtcagagaggctactgcacctttctggtcacgaccgtgcatcgggttagcacccggtccgaacggcgcgccagcacgacgaccgtctggggtgttacccgttttcttaccatacacaacgttagaagtgatggtcagaacagactgagtcgggatagcgtcacggtaggtgtgcagtttctgaattttcttcatgaaacgttctaccaggtcaacagccaggtcatctacacgcggatcattgttaccaaactgcgggtattcgccttcgatttcgaagtcgatagccagaccgtcttcgtcacgaatcggtttaactttcgcatatttgattgcagacagggagtcagcagcaacggacagaccagcgataccacacgccatggtgcggataacgtcacggtcgtgcagcgccatcagagaggcttcgtagctgtacttgtcgtgcatgtagtggatgatgttcagtgcagtgatgtactgtttagccagccagtccatgaagtgatccatgcgctccatcacttcatcatagttcaggacatcgcctttgatcggttcagacttcggaccaacctgcattttcagtttttcgtcaacgccgccgttgattgcgtacagcatggttttcgccaggtttgcacgcgcaccgaagaactgcatttgtttaccaacgatcatcgggcttacgcagcaagcaatagcgtagtcatcgttgttgaagtccggacgcatcaggtcatcgttctcatactgcagagaagaggtgtcgatggacactttagcggcgaatttcttgaagttcagcggcagtttttcagaccacagaatggtcatgttcggttccggagacggacccatggtgtacagggtgttcaggaaacggaagctgtttttggtaaccagggtacgaccgtcgaggcccataccaccgatagattcggttgcccagatcgggtcgccagagaacagttcatcgtattccggagtacgcaggaagcgaaccatacgcagtttcatgaccaggtggtcaaccatttcctgcgcttcttgttcggtgatcttgccagctttcaggtcacgttcgatgtacacatccaggaaggtggaggtacgaccgaaggacattgcagcaccgttctgagacttaacagcagccaggtagccgaagtaagtccactggatagcttcctgagcgttggtagccggaccagagatgtcgtagccgtatttcgcagccatttctttcatctgacccagagcgcggtgctgttcagcgatttcttcgcgcagacggatagtctgttccaggtttacgccgttttccagatcagcctgcagagaagtgaactgtgccagtttgtctttcatcaggtagtcgataccgtacagcgcaacgcgacggtagtcaccgatgatacggccacggccatatgcatctggcagaccggtcagaacaccagatttacggcaacgcaggatgtccggagtgtaaacgtcgaacacgccctggttgtgagttttacggtattcagtgaagatttttttgatcatcggatccagttcgcggttgtacgctttgcaggaaccttcgatcattttgataccaccgaacgggataagagcacgtttcagcggagcttcagtctgcagaccaacgattttctcaagctgcttgttgatgtagccagcgtcgtgagaggtgatggtggaagcaacagcggtgtcaaagtcaactggcgcgtgagtgcggttttccagtttaacgccttccattactttgtcccacagggtggtggtcgcttcagtagcgccagccaggaaggactcgtcaccctcgtacggagtgtagtttttctgaatgaagtcacggacgtttacttcattctgccagtcacctttggtaaaaccttcccaggctgtggctaacttttcattaagctcggacatgtaacacctaccttcttaagtggattttttatttactgcgtacttcgacaaccattaatggtggtcgttttcacgcaggtaaatgacccagtatgtcaacccaaccaacaaaccaccaccgataatgttgccgatcgtaaccggaatcaggttatcagtgatgaaattcatcacggtcaggtgagaaaaattttccggtgcagaaccgactgcggtccaaaattccggggatgcgaagtcgcggattacaatacccatcgggatcataaacatgtttgcgatactgtgctcaaaaccgctggcaacaaacatcgcgaccggcagcaccataatgaacgctttgtccatcaggctgcggccagaataactcatccatactgccagacataccatcaggtttgccaggataccaagacagacggcctcaataaaagtatggtgcactttgtggtcggcggtttgtaggacgtttagtccccattgaccatttgcggtcatatactcgccggaaagccacattaaaagtacaaacagcagtgcgccgaccaggttgccaaaatagacatttagccagtttttcgccaactgaccccaggtgatgcgcccactcgccttagcaacaacaatcaacacggtggaagtaaagagatcggctccgcagacaacacaaagaatcagccccagagagaagcaaatgccgccaaccagttttgccatgccgaagggcattgtgcctgtgccagtggttgctgtgatatagaagacgaatgcgatactgatgaaaacaccggcggtaatcgccagatagaaagtcttaagcggatgtttcgttgctttatagacacccgcctcttcggccactttggccattgcagcaggaagtaaaagatcaaaagggttgtcagctttcacactaactctctctttattaagtcggcgacgagatactaacaaagcattatagatgagaaattgatatagatcatatctcgcctggcttataggcccgtaactcgcatggtttttatgcaaatacggagtaaatatttgattatccaaataaaaataaattttaaaaattaacaaatgagttgaattttttccgcatcctccgctaaaacagttaattaaaagggagcatcaggcgaataaagtaacaatatcgatcgtatttattaaatacaaattaccgatatttaaccttataattacaattattttattaatgcaaatatatgtaaagcggggcattaaaaaaacgccccgtaatataactcagactaatcattaagcctacattgcgtaggctatttgattttattttgcccagaatgctgctttggcgcgctgcagcttttcgtaggccttcaacaagctctgatgtgcagcaaacgcgtgcagatcgctatctaccggttgcaggccgtaaaacgccgcttcgccgctcattgccgcactggcggcttctacggcatctgcgccgtacatgcgaacaaacgcattcagatattgcagcggctggcgatcttcttcctgtgccagtaataacaacgtttgcaggcagcgataatagttggcgcgttccggactaaatacactactgttaaactccatcgtccattcggtccagaccagagcctgttccagatcgccaccagccagcgccagcatggcttttaattcaccgatacgcagggtgtaccaaccgttatcgctcccggtcgccagacccaacagctcacgcacgcgggtaaagtcatcaaaaccttcttcatccagttgctcgatgaggttcaggtaatcttctttttcccactcgctgcctggtaggctaagaatcgtttcacgtaaatggctgcccatactgttattcgcgagccacagatcttcagccggataaatatcggacatgccaggcacgataatacggcaagcataaacgcccagatgctcgtaatcggcaatataaacttctttatcttctttgttgaagatagccatcagtgtggcgaactcttcttccgtggtgccggagaaattccagtccacaaacggataatcggcatcctgcttgaacaggtcccaggagattaaaccgctggaatcgataaagtgcgtttcgaggttggtatgttcagcgacttcttcatcatcgaaggttggcggagtaaacacatccaaatctttcaggccacgaccttgcagcagctcggtcacggtacgttccagtgctacgccaaaatcaggatgcgcaccgaaagaggcaaagcaggtaccgttagcaggattgaacagtaccacgcaaatcaccggatactggccgccaaggctaccgtcataagcgaagattgggaaaccctccgcttccagcgtttcgatggcttcaactactgctgggtaacgcgccagcacgtctgccgggatctctggcaggctgatgctttcagcaataatgcggtttttcacgtagcgttcgaaaacttcagacaatccctgaacgcgtgcttcgttgcgggtattacctgcggacataccgttggagacgtacaggttaccaatgatattcatcggaatataaacggtctgattgtcggactgacgcgtaaacggcaggccgcaaataccacgatcttcgttaccggattgtaggtcaatcagcatgctgccggtcagttcattctccggatcataaaacgcgcgcagacggtcatcgagcagcccttctggcacatcgtcattttcggtcagtgggaaccatttttcgttgggataatgcacgaacggaccgttggcgatggtttcgcccagccagaagtccgcaaaaaagtagttggtactgagacgctcgaaatattcaccgagtgcagaagccagcgccgctttcttggttgcgcctttaccgttggtaaaacacagtgcgcactctttgtcgcgaatatgtacagaccagacgttaggcacgggattcagccaggaggcctcttcaatctgaaagccgaggtcactaagtttttgctggaagcgagcgatggaatcttccagagcggcatctttgccggggataaatgtttgcgtcatgaaaatcactttagtcgtacggaaagcgcgcaataatacgggttttatctcaaaggcgctatcaccgccgccatgccgatgaactgttgactatgcttttagcggataaaccacgttaagagcataaaaatgaaggcgttcgatctccaccgtatggcatttgataaagtgccttttgatttccttggcgaagttgcactacgtagtctttatacctttgtactggtctttttgttcctcaaaatgaccggaagacgcggtgtgcggcagatgagcctgtttgaagttttaatcattctgacgctgggaagtgcggcgggagatgtggcgttttatgatgatgtgccgatggtcccggtacttatcgtctttattactctggcgttgttataccgcctggtaatgtggttgatggcgcacagtgaaaaactggaagatcttctggaaggcaagccagttgtcattattgaagatggcgagctggcctggagcaaactcaataactccaacatgacggaatttgagttctttatggagctacgattgcgtggcgtggagcagctggggcaggtacgtctggcgattctcgaaaccaacgggcaaatcagtgtctatttctttgaagatgacaaggtgaaaccgggtttacttattttacccagtgattgtacgcagcgttacaaagtggtgccggagagcgcggactatgcctgtattcgttgtagtgaaatcattcatatgaaagcgggggaaaaacaattatgtccgcgctgtgcaaatccagaatggacgaaggcaagtcgggcaaaacgggtgacctgacagtaaaaacatcggctttttgctaataatccgagagattcttttgtgtgatgcaagccacatttttgccctcaacggttttactcattgcgatgtgtgtcactgaatgataaaaccgatagccacaggaataatgtattacctgtggtcgcaatcgattgaccgcgggttaatagcaacgcaacgtggtgaggggaaatggctcaaatcttcaattttagttctggtccggcaatgctaccggcagaggtgcttaaacaggctcaacaggaactgcgcgactggaacggtcttggtacgagcgtgatggaagtgagtcaccgtggcaaagagttcattcaggttgcagaggaagccgagaaggattttcgcgatcttcttaatgtcccctccaactacaaggtattattctgccatggcggtggtcgcggtcagtttgctgcggtaccgctgaatattctcggtgataaaaccaccgcagattatgttgatgccggttactgggcggcaagtgccattaaagaagcgaaaaaatactgcacgcctaatgtctttgacgccaaagtgactgttgatggtctgcgcgcggttaagccaatgcgtgaatggcaactctctgataatgctgcttatatgcattattgcccgaatgaaaccatcgatggtatcgccatcgacgaaacgccagacttcggcgcagatgtggtggtcgccgctgacttctctagtaccattctttcccgtccgattgacgtcagccgttatggtgtaatttacgctggcgcgcagaaaaatatcggcccggctggcctgacaatcgtcatcgttcgtgaagatttgctgggcaaagcgaatatcgcgtgtccgagcattctggattattccatcctcaacgataacggctccatgtttaacacgccgccgacatttgcctggtatctatctggtctggtctttaaatggctgaaagcgaacggcggtgtagctgaaatggataaaatcaatcagcaaaaagcagaactgctatatggggtgattgataacagcgatttctaccgcaatgacgtggcgaaagctaaccgtagccggatgaacgtgccgttccagttggcggacagtgcgcttgacaaattgttccttgaagagtcttttgctgctggccttcatgcactgaaaggtcaccgtgtggtcggcggaatgcgcgcttctatttataacgccatgccgctggaaggcgttaaagcgctgacagacttcatggttgagttcgaacgccgtcacggttaatgccgaaattttgcttaatccccacagccagcctgtggggtttttatttctgttgtagagagttgagttcatggaatccctgacgttacaacccatcgctcgtgtcgatggcactattaatctgcccggttccaagagcgtttctaaccgcgctttattgctggcggcattagcacacggcaaaacagtattaaccaatctgctggatagcgatgacgtgcgccatatgctgaatgcattaacagcgttaggggtaagctatacgcttagtgccgatcgtacgcgttgcgaaattatcggtaacggcggtccattacacgcagaaggtgccctggagttgttcctcggtaacgccggaacggcaatgcgtccgctggcggcagctctttgtctgggtagcaatgatattgtgctgaccggtgagccgcgtatgaaagaacgcccgattggtcatctggtggatgcgctgcgcctgggcggggcgaagatcacttacctggaacaagaaaattatccgccgttgcgtttacagggcggctttactggcggcaacgttgacgttgatggctccgtttccagccaattcctcaccgcactgttaatgactgcgcctcttgcgccggaagatacggtgattcgtattaaaggcgatctggtttctaaaccttatatcgacatcacactcaatctgatgaagacgtttggtgttgaaattgaaaatcagcactatcaacaatttgtcgtaaaaggcgggcagtcttatcagtctccgggtacttatttggtcgaaggcgatgcatctagcgcttcttactttctggcagcagcagcaatcaaaggcggcactgtaaaagtgaccggtattggacgtaacagtatgcagggtgatattcgctttgctgatgtgctggaaaaaatgggcgcgaccatttgctggggcgatgattatatttcctgcacgcgtggtgaactgaacgctattgatatggatatgaaccatattcctgatgcggcgatgaccattgccacggcggcgttatttgcaaaaggcaccaccacgctgcgcaatatctataactggcgtgttaaagagaccgatcgcctgtttgcgatggcaacagaactgcgtaaagtcggcgcggaagtggaagaggggcacgattacattcgtatcactcctccggaaaaactgaactttgccgagatcgcgacatacaatgatcaccggatggcgatgtgtttcagcctggtggcgttgagtgatacaccagtgacgattcttgatcccaaatgcacggccaaaacatttccggattatttcgagcagctggcgcggattagccaggcagcctgaatgaacaacgggcaataaatagccaaatctttctttatcaaaacgtcggcacattgtcggcgttttttttcggaccttgtgagtcattttgattaatggtagcgtcgcttgtcaatgtaagttgttgatacataatatttatatatgattaatcaacggatgattcacatgaagaatactaaattactgctggcgattgcgacctctgcagcattactgacagggtgtcaaaatacccacggtattgataccaatatggctatcagctccggtttaaatgcctataaagcagcaacattaagcgatgccgatgcaaaagcgattgccaatcagggctgtgccgaaatggacagcggcaatcaagtcgcaagtaaatccagcaagtacggtaaacgtctggcaaaaatcgccaaagcattgggtaacaatattaatggcacgccggtcaactataaggtttatatgaccagcgacgtcaacgcatgggcgatggcgaacggctgtgttcgtgtctacagtggcctgatggacatgatgaatgacaacgaaattgaaggcgttctgggccatgaactgggccacgtcgcgttgggtcacagcctggctgaaatgaaagcttcttatgcgatcgttgccgcacgcgatgccattagtgctaccagcggtgtggcttcccagctttcccgcagtcaattaggtgatatcgcagaaggcgctatcaatgctaaatactcccgtgataaagagtccgaagcagatgatttctcctttgatctgttgaagaaacgtggcatcagcacccaggggctggttggcagctttgaaacactggctagcctggatggcggtcgcacccagtccatgtttgactctcacccaccaagtacagagcgtgcgcaacacatccgtgatcgtatcgcctctggtaagtaaatcattgtcatctttcgggctggtcttctgccagcccgctataattgcgcaataaatccccatctgaatacagacaaaactggtttttgcacacaacgttaacgatttgtggcgtcggcgcgtataatgcgcgcggttatgttaacggtacgcctgttttaaggagataaagatgacggcaattgccccggttattaccattgatggcccaagcggtgcagggaaaggcaccttgtgtaaggctatggcggaagcgttgcaatggcatctgctggacagcggtgcaatttatcgcgtactggcattggcggcattacatcaccatgttgatgttgcgagcgaagatgcgctggtaccgctggcatcccatctggatgtacgttttgtgagcaccaatggcaatctggaagtgatcctcgaaggggaagatgtcagcggcgaaattcgtactcaggaagtggcgaatgcagctagtcaagtcgcggcattcccacgcgttcgtgaagcattattgcgtcgccaacgcgcgtttcgcgaattaccaggtctgattgccgatggccgcgacatgggaacggtggtattccctgatgcaccagtgaaaattttccttgacgcctccagcgaagaacgtgcgcatcgccgcatgctacagttgcaggagaagggctttagtgttaactttgagcgccttttggccgagatcaaagaacgcgacgaccgcgatcgtaaccgagcggtagcgccactggttccggcagccgatgctttagtgttggattccaccaccttaagcattgagcaagtgattgaaaaagcgctacaatacgcgcgccagaaattggctctcgcataagcgaccgaatttgcagtacccccgttgcaatggaatgacagcgggtatgttaaacaaccccatccggcatggagccaggtggacgttaaatataaacctgaagattaaacatgactgaatcttttgctcaactctttgaagagtccttaaaagaaatcgaaacccgcccgggttctatcgttcgtggcgttgttgttgctatcgacaaagacgtagtactggttgacgctggtctgaaatctgagtccgccatcccggctgagcagttcaaaaacgcccagggcgagctggaaatccaggtaggtgacgaagttgacgttgctctggacgcagtagaagacggcttcggtgaaactctgctgtcccgtgagaaagctaaacgtcacgaagcctggatcacgctggaaaaagcttacgaagatgctgaaactgttaccggtgttatcaacggcaaagttaagggcggcttcactgttgagctgaacggtattcgtgcgttcctgccaggttctctggtagacgttcgtccggtgcgtgacactctgcacctggaaggcaaagagcttgaatttaaagtaatcaagctggatcagaagcgcaacaacgttgttgtttctcgtcgtgccgttatcgaatccgaaaacagcgcagagcgcgatcagctgctggaaaacctgcaggaaggcatggaagttaaaggtatcgttaagaacctcactgactacggtgcattcgttgatctgggcggcgttgacggcctgctgcacatcactgacatggcctggaaacgcgttaagcatccgagcgaaatcgtcaacgtgggcgacgaaatcactgttaaagtgctgaagttcgaccgcgaacgtacccgtgtatccctgggcctgaaacagctgggcgaagatccgtgggtagctatcgctaaacgttatccggaaggtaccaaactgactggtcgcgtgaccaacctgaccgactacggctgcttcgttgaaatcgaagaaggcgttgaaggcctggtacacgtttccgaaatggactggaccaacaaaaacatccacccgtccaaagttgttaacgttggcgatgtagtggaagttatggttctggatatcgacgaagaacgtcgtcgtatctccctgggtctgaaacagtgcaaagctaacccgtggcagcagttcgcggaaacccacaacaagggcgaccgtgttgaaggtaaaatcaagtctatcactgacttcggtatcttcatcggcttggacggcggcatcgacggcctggttcacctgtctgacatctcctggaacgttgcaggcgaagaagcagttcgtgaatacaaaaaaggcgacgaaatcgctgcagttgttctgcaggttgacgcagaacgtgaacgtatctccctgggcgttaaacagctcgcagaagatccgttcaacaactgggttgctctgaacaagaaaggcgctatcgtaaccggtaaagtaactgcagttgacgctaaaggcgcaaccgtagaactggctgacggcgttgaaggttacctgcgtgcttctgaagcatcccgtgaccgcgttgaagacgctaccctggttctgagcgttggcgacgaagttgaagctaaattcaccggcgttgatcgtaaaaaccgcgcaatcagcctgtctgttcgtgcgaaagacgaagctgacgagaaagatgcaatcgcaactgttaacaaacaggaagatgcaaacttctccaacaacgcaatggctgaagctttcaaagcagctaaaggcgagtaattctctgactcttcgggatttttattccgaagtttgttgagtttacttgacagattgcaggtttcgtcctgtaatcaagcactaagggcggctacggccgcccttaatcaatgcagcaacagcagccgcttaatttgcctttaaggaaccggaggaatcatgaccaagagtgaattgatagaaagacttgccacccagcaaagccacattcccgccaagacggttgaagatgcagtaaaagagatgctggagcatatggccagcactcttgcgcagggcgagcgtattgaaatccgcggtttcggcagtttctctttgcactaccgcgcaccacgtaccggacgtaatccgaagactggcgataaagtagaactggaaggaaaatacgttcctcactttaaacttggtaaagaactgcgcgatcgcgccaatatttacggttaagttttttactcaaacttgaacgagagaaaagcacctgtcgggtgcttttttcatttctctaatctggaactggaagctgcctcgcagagttttgaacagttttcaccctttcgttaaattcttctgaatatgcctcggggaacgcaaaattcccaccagacaaccgctcaacaaagttgcacactttccataaacagggaggggtgcatgaaaataacgacagtcggtgtatgcataattagcggaatttttccgttgctgattttgccccaattgcctgggacattaacccttgcgtttctgactctcttcgcctgcgtactggcatttatccctgttaaaaccgtccgttatatcgcgctgacgttgctgtttttcgtttggggcatattaagtgcaaagcaaattttgtgggcaggagaaaccttaactggcgcgacgcaggatgcaattgttgagatcactgcaactgacggcatgaccactcattacggtcaaattactcatctacaaggtcgacgtatattccctgcgagtggtctcgtgatgtatggcgaatatcttccgcaagcggtttgtgctggacaacaatggagtatgaaactcaaagttcgtgcagttcatggccaacttaatgatggcggctttgatagccagcgttatgccattgcccagcatcagccgctcaccggccgttttctgcaggcaagtgtcattgaaccgaattgtagcctgcgtgcacagtatctggcgagtctacaaacaacgctgcaaccctatccgtggaatgcggttattcttggtttaggtatgggggaacggttatccgtccccaaagaaatcaaaaatatcatgcgcgatactggaacggcgcatttaatggcgataagcggattgcacatcgcttttgcggcgttgctggctgccggactcattcgcagtggacaaatttttctgcctgggcgctggatccactggcaaataccattaattggcggaatctgctgtgctgctttttatgcctggttgacgggaatgcaacctcctgcattgcgtaccatggtggcgcttgctacgtggggaatgcttaagttaagtgggcgacagtggagtggctgggatgtatggatatgttgtctggcggcaattttgctgatggatcctgttgccattctcagccaaagtttatggctctctgccgctgcggtcgcggcattgatattttggtatcagtggtttccctgtcctgagtggcaactgccgccggtattgcgtgcagttgtttccctcatccatctgcaactgggaatcacacttctgcttatgcccgtgcaaatcgtcatatttcatggcattagtctgaccagctttattgcaaatctattagcaattcccttggtgacatttatcacggttccgttgatcctcgccgcgatggttgtgcatttaagcgggccgttaatcctggagcaagggttatggtttcttgccgaccggtctttggctttacttttctgggggttaaagagtttgccggaagggtggatcaacattgctgaatgttggcaatggctaagtttttccccatggttcttactggtggtatggcgattaaacgcctggcgaacgttgccagcaatgtgtgtggctggaggcttgctgatgtgctggccgctgtggcaaaaacctcgacctgacgagtggcagctgtacatgcttgatgtcgggcaagggctggcaatggtgatagccagaaacggcaaagcgattctctatgacacaggactggcctggcctgaaggggatagtgggcaacaactgattatcccctggctccactggcataatcttgaaccggaaggcgttattctgagccatgaacatctggatcaccggggagggctggatagtatattgcatatatggccgatgttatggatcagaagtccgttaaactgggaacatcatcagccctgtgtgcgtggcgaagcgtggcaatggcaaggattgcgtttcagcgcgcactggcctttacaaggtagcaacgataaaggaaataaccattcctgtgtggttaaggttgatgacgggacgaatagcattcttctaaccggtgatattgaagccccagctgaacaaaagatgctaagccgttactggcagcaagtgcaggcaacattgcttcaggtacctcaccatggcagtaataccagtagtagcttgccattaattcagcgagtgaatggaaaagtggcactcgcaagcgcaagccgctataacgcatggcgactgccctctaacaaagttaagcatcgctatcaactgcaaggatatcaatggattgatactccacatcaaggtcaaacaacggtcaattttagtgcgcaaggctggcggattagcagcctcagggagcaaattttacctcgttggtatcatcagtggtttggcgtgccagtggataacgggtaaaatatgcggctatttcaacaaatgctggttttttgaatgcataacgacaaagatctctctacgtggcagacattccgccgactgtggccaaccattgcgcctttcaaagcgggtctgatcgtggcgggcgtagcgttaatcctcaacgcagccagcgataccttcatgttaagcctccttaagccacttcttgatgatggctttggtaaaacagatcgctccgtgctggtgtggatgccgctggtggtgatcgggctgatgattttacgtggtatcaccagctatgtctccagctactgtatctcctgggtaagtggaaaggtggtaatgaccatgcgtcgccgcctgtttggtcacatgatgggaatgccagttagtttctttgacaaacagagtacgggtacgctgttgagtcgtattacctacgattccgaacaggttgcttcttcttcttccggcgcactgattactgttgtgcgtgaaggtgcgagcatcatcggcctgttcatcatgatgttctattacagttggcaactgagcatcattttgattgtgctggcaccgattgttagcattgcgattcgcgttgtaagcaagcgttttcgcaacatcagtaaaaacatgcagaacaccatggggcaggtgaccaccagcgcagaacaaatgctgaagggccacaaagaagtattgattttcggtggtcaggaagtggaaacgaaacgctttgataaagtcagcaaccgaatgcgtcttcaggggatgaaaatggttagtgcctcttccatctctgatccgatcattcagctgatcgcctctttggcgctggcgtttgttctgtatgcggcgagcttcccaagtgtcatggatagcctgactgccggtacgattaccgttgttttctctagtatgattgcactgatgcgtccgctgaaaagcctgaccaacgttaacgcccagttccagcgcggtatggcggcttgtcagacgctgtttaccattctggacagtgagcaggagaaagatgaaggtaagcgcgtgatcgagcgtgcgactggcgacgtggaattccgcaatgtcacctttacttatccgggacgtgacgtacctgcattgcgtaacatcaacctgaaaattccggcagggaagacggttgctctggttggacgctctggtagcggtaaaagtaccatcgccagcctgatcacgcgtttttacgatattgatgaaggcgaaatcctgatggatggtcacgatctgcgcgagtataccctggcgagcttacgtaaccaggttgctctggtgagccagaatgtccatctgtttaacgatacggttgctaacaacattgcttacgcacggactgaacagtacagccgtgagcaaattgaagaagcggcgcgtatggcctacgccatggacttcatcaataagatggataacggtctcgatacagtgattggtgaaaacggcgtgctgctctctggcggtcagcgtcagcgtattgctatcgctcgagccttgttgcgtgatagcccgattctgattctggacgaagctaccagcgctctggataccgaatccgaacgtgcgattcaggcggcactggatgagttgcagaaaaaccgtacctctctggtgattgcccaccgcttgtctaccattgaaaaggcagacgaaatcgtggtcgtcgaggatggtgtcattgtggaacgcggtacgcataacgatttgcttgagcaccgcggcgtttacgcgcaacttcacaaaatgcagtttggccaatgatcgaaaaaatctggtctggtgaatcccctttgtggcggctattgctgccactctcctggttgtatggcctggtgagtggcgcgatccgtctttgctataaactaaaactgaagcgcgcctggcgtgcccccgtaccggttgtcgtggttggtaatctcaccgcaggcggcaacggaaaaaccccggtcgttgtctggctggtggaacagttgcaacagcgcggtattcgcgtgggggtcgtaagccggggatatggtggtaaggctgaatcttatccgctgttattgagcgcagataccacaacagcacaggcgggtgatgaacctgtgttgatttatcaacgcactgatgcgcctgttgcggtttctcccgttcgttctgatgcggtaaaagccattctggcgcaacaccctgatgtgcagatcatcgtaaccgacgacggtttacagcattaccgtctggcgcgtgatgtggaaattgtcgttattgatggtgtgcgtcgctttggcaatggctggtggttgccggcggggccaatgcgtgagcgagcggggcgcttaaagagcgttgatgcggtaatcgtcaacggcggtgtccctcgcagcggtgaaatccccatgcatctgctgccgggtcaggcggtgaatttacgtaccggtacgcgttgtgacgttgctcagcttgaacatgtagtggcgatggcggggattgggcatccgccgcgcttttttgccacgctgaagatgtgtggcgtacaaccggaaaaatgtgtaccgctggccgatcatcagtctttgaaccatgcggatgtcagtgcgttggtaagcgccgggcaaacgctggtaatgactgaaaaagatgcggtgaaatgccgggcctttgcagaagaaaattggtggtatttgcctgtagacgcacagcttagtggtgatgaaccagcgaaactgcttacgcaactaaccttgctggcttctggcaactaattacgccgcggcagcgttcgattgatggagtcatgaatgagcctgccgcacctctcccttgctgatgcgcgtaatcttcaccttgccgcacaaggcctgttaaacaaaccccgccgtcgagcgagcttggaggatattccggcaacgatctcccgcatgtccttgctgcaaatcgataccatcaatattgttgcccgtagtccatatctggtgcttttcagtcgtctgggaaattatcctgcccagtggctggatgagtctctggcgcgtggcgaattaatggaatactgggcgcatgaagcctgctttatgccgcgtagcgactttcgtcttattcgccaccgcatgctggcacctgaaaaaatgggctggaaatacaaagacgcctggatgcaggaacatgaggcggaaattgcacagttaattcagcatattcatgataaggggccggtacgtagtgccgattttgagcatcctcgtaaaggtgcaagcggctggtgggaatggaagccgcataaacggcatctggaaggtttatttactgccggaaaggtgatggtgattgaacggcgcaacttccagcgcgtttatgatttaacccaccgtgtcatgcctgactgggatgatgagcgcgatctcgttagccaaacagaagcagaaatcatcatgctggataacagtgcgcgtagcctgggaatattccgcgaacagtggctggcagattactatcggctgaaacgtccggcactggcggcgtggcgcgaagcgagggctgaacagcagcaaatcattgctgtgcatgttgaaaaattgggcaatctttggctgcatgatgatttgctgccgctactcgagcgagcgctggccggaaagctcactgcaacgcacagcgcggtacttagcccttttgatcctgttgtctgggatcgcaaacgcgcagagcagctttttgattttagctaccggctggagtgctataccccagcgccgaaacgccagtatggctattttgttctgccgttattacatcgtgggcaattagttgggcgaatggatgccaaaatgcatcgccagacaggcatccttgaagttatctctctgtggttacaggaaggtattaaaccaacgacaacgctgcaaaaagggctacgtcaggcgattactgatttcgctaactggcagcaggcaacgcgggtgacattaggatgctgcccgcaaggcctctttactgattgccgcaccggctgggaaatagaccccgtcgcataaatgattatgataagatttatgcattcataacccgatccatctggaggaactatggatcatcgtctgcttgaaatcattgcctgcccggtttgcaacggaaaactttggtataaccaggaaaaacaagagcttatttgcaaactggacaacctcgctttcccgctgcgtgatggcattccagtgttgctggaaacggaagcccgcgtgctgactgctgatgagagtaaaagttgatgtaaactgctgatgagagtaaatcatgagttttgtggtcattattcccgcgcgctacgcgtccacgcgtctgcccggtaaaccattggttgatattaacggcaaacccatgattgttcatgttcttgaacgcgcgcgtgaaagtggtgccgagcgcatcatcgtggcaaccgatcatgaggatgttgcccgcgccgttgaagccgctggcggtgaagtatgtatgacgcgcgccgatcatcagagtggaacagaacgtctggcggaagttgtcgaaaaatgcgcattcagcgacgacacggtgatcgttaatgtgcagggtgatgaaccgatgatccctgcgacaatcattcgtcaggttgctgataacctcgctcagcgtcaggtgggtatggcgactctggcggtgccaatccacaatgcggaagaagcgtttaacccgaatgcggtgaaagtggttctcgacgctgaagggtatgcactgtacttctctcgcgccaccattccttgggatcgtgatcgttttgcagaaggccttgaaaccgttggcgataacttcctgcgtcatcttggtatttatggctaccgtgcaggctttatccgtcgttacgtcaactggcagccaagtccgttagaacacatcgaaatgttagagcagcttcgtgttctgtggtacggcgaaaaaatccatgttgctgttgctcaggaagttcctggcacaggtgtggatacccctgaagatcttgagcgcgttcgcgctgaaatgcgctaatttcacttcacgacacttcagccaattttgggaggagtgtcgtaccgttacgattttcctcaatttttcttttcaacaattgatctcattcaggtgacatcttttatattggcgctcattatgaaagcagtagcttttatgagggtaatctgaatggaacagctgcgtgccgaattaagccatttactgggcgaaaaactcagtcgtattgagtgcgtcaatgaaaaagcggatacggcgttgtgggctttgtatgacagccagggaaacccaatgccgttaatggcaagaagctttagtacgcccggaaaagcccgacaactggcatggaaaaccaccatgctggcaagaagtgggactgtccgtatgccgactatttatggtgtgatgacgcatgaagaacaccccggccccgatgtcctgctactggagcggatgcgtggtgttagcgtggaggcaccagcccgaacaccagaacgctgggaacaactcaaagaccaaatcgttgaagccttactggcctggcaccgtcaggacagtcgcggttgcgtcggcgcggtcgacaatactcaggaaaatttctggcccagttggtaccggcaacatgttgaagtgctatggaccacgctcaatcagttcaataacaccggtctgacgatgcaggataagcggatcctgtttcgcactcgcgaatgtctcccggcattatttgaaggctttaacgacaattgtgtgctgattcacggtaacttctgtttacgcagcatgttgaaagatagccgcagcgatcagttactggcgatggtcgggccgggactaatgctttgggcaccgcgagaatacgaactgttccgactaatggataattctctggcggaagatttgctctggagttacctgcaacgcgcgccagtggcggagagcttcatctggcggcgttggttgtatgtgttatgggatgaagttgcgcaactggttaataccggacgatttagtcggcgcaacttcgatctggcaagtaaaagtctcttgccgtggctcgcctgatcactcttgccgtggctcgccactgctaccttttagccactgccagatacggccaagcgtttcatagccaacacgatcgctatgcatcaaccagaccggagaagggattgcccgttcccacgggttaagcgggctgtcgatggccaactgattcgccggggctggtagcggatttaacccttcctgctgaaaaaagatcatcgcccgcggcagatgacttgcggaggtcaccagcaggaaaggggcgtcaccaatcgcctgtttcactgctgcagcttcttcttcggtatcttttggcaaatccagggtgataatttgctcgcgcggcacgcccaggctttgcgcaactctggcacctacttccgctgtactcaccgtattggtttttgctacgcctcccgtgaagatcagtttacttcccggattttcgcgccataagcgaataccttcattcaggcgtggcagactgttattgattaaattagagctcggtgcccactgcgggttccaggtataaccacctccgagcaccacgatatagtccactttttggctattattccatgtcggataggtgctttcgatgggacgcagcaggcggtcggctaccggttgcaaactcaataacaagagcgccagccacccaatgctaataaaaatcttcccggttttttgaaaacggctaaaccacagcagcgccaggccagcgccaataatcaacaacatcagcggaagtggcagcaacatattgccaatcacttttttcagtgtaaaaagcatcctttctggttccttttttaaccatatagcaagggatcgccagcgatattacaccagacgggttcattctcgccgtggctgtgacaaaatagcgtctttatcagaaaacgtcttagccaaccggtggagaaagcaatgcaggatcgcaattttgatgatattgcggaaaagttttcccgtaacatttacggcaccaccaaagggcagcttcgacaggctattctgtggcaggatctcgatcgcgtgctggcggaaatgggcccgcaaaaactgcgtgtgctggatgctggcggtggagaagggcagaccgcaatcaaaatggccgagcgtgggcatcaggtcattttatgcgatctttctgcgcagatgatcgaccgcgcaaaacaggcggcagaagcaaaaggtgtgagcgacaacatgcaatttatacattgcgccgctcaggatgttgctagccatttggaaacgcccgttgatctgatattgttccatgcggtgctcgagtgggtggctgatccccgcagcgtattgcagaccctctggagtgtgttgcgtccaggcggcgtgttgagcttaatgttctacaatgcgcatggtttgttgatgcataacatggtcgccgggaattttgattacgtgcaggcgggaatgccgaaaaagaaaaaacggacgcttagcccagattatccacgcgacccggcgcaggtttatctgtggctggaagaagctggttggcaaattatgggtaagacaggcgttcgcgtgtttcatgattatctgcgcgagaaacaccagcagcgcgactgctatgaagcattacttgaattagaaacgcgttattgccgtcaggaaccgtatattaccctggggcgttatattcatgtcaccgcgcgcaaaccgcagagcaaggataaagtatgagtgaattttcccagacagtccccgaactggttgcctgggccagaaaaaatgacttctccatcagcctgccggtagaccgactctcttttctgctggcggttgccacgctgaacggcgagcgtctggatggtgagatgagtgaaggcgagctggtggatgcattccgccatgtgagtgatgcgtttgagcaaaccagcgaaaccatcggcgtgcgcgccaataacgcgatcaacgacatggtgcgtcaacgtctgctgaaccgctttaccagcgagcaggcggaagggaacgcaatttaccgtctgacgccgctcggcatcggcattactgactactacatccgtcagcgcgagttttctacgctgcgtctttctatgcagttgagcattgtggcgggtgagctcaaacgcgcagcagatgccgccgaagagggcggtgatgaatttcactggcaccgtaatgtctatgcgccactgaaatatagcgtagcagaaattttcgacagtatcgacctgacgcaacgtctgatggacgaacagcagcagcaggtgaaggacgatatcgcccagttgctgaacaaagactggcgggcggcgatttccagctgtgaattgttgcttagcgaaacttccggaacgctgcgtgaattgcaggatacgctggaagcggcaggcgacaaattgcaggctaatctgttgcgcattcaggatgcgacgatgacccatgacgatctgcatttcgtcgatcgtctggtgttcgatctgcagagcaaactcgatcgtattatcagttggggccagcaatccatcgacttgtggattggctacgaccgccacgtacacaaatttattcgtaccgcgatcgatatggataaaaaccgcgtctttgctcagcggttacgtcagagcgtacaaacctattttgatgagccgtgggcgctaacttatgccaatgccgatcgtctgctggatatgcgtgacgaagagatggcactgcgcgatgaagaagtgactggggaacttcctgaggatctggaatacgaagagtttaacgagatccgcgaacagctggcggcgatcatcgaagaacaacttgccgtgtacaaaaccagacaagtgccgctggatcttggtctggtggtacgcgaatatctgagtcagtatccgcgtgcacgtcactttgacgttgcgcgtattgttattgatcaggcggtacgtcttggcgtagcgcaagcagatttcaccggactgccagcgaaatggcagccgattaatgattacggagccaaggtacaggcgcatgtcatcgacaaatattgaacaagtgatgccggttaagctggcgcaggcgctggcgaatccgttatttccggcgctggacagcgccttacgtagtggacgccatattggcctcgacgaactggataatcatgcattcctgatggattttcaggaatatctggaagagttttacgcgcgttataacgttgagcttattcgcgcaccagaagggttcttctatttacgcccacgttccaccacgctgatccctcgttccgtcttgagcgaactggatatgatggtcgggaaaatcctctgttatctctatctcagcccggaacggctggcgaatgaggggattttcacccagcaggaactgtacgacgaactgctcaccctggccgatgaagcaaaactgctgaaactggtgaacaaccgtagtaccggtagtgacgttgaccgtcagaagttgcaggagaaagtacgttctagcctcaaccgtctgcgtcgtttaggcatggtgtggtttatgggccacgacagcagcaagtttcgcattaccgaaagcgtgttccgcttcggagccgatgtgcgtgctggcgacgatccccgtgaagcacagcgtcgcctgattcgtgatggcgaagcaatgccgattgaaaatcatctgcaactcaacgatgaaaccgaagagaatcagccagatagcggagaggaagaataatgattgaacgcggtaaatttcgcagtctgacgctgattaactggaacggcttttttgcccgaacttttgaccttgacgagctggtcacgacgctttctggcggtaacggggcgggtaaatccaccaccatggcggcgttcgttacggcgctgatccccgacctgaccctgctgcatttccgtaacactacggaagccggggccaccagcggtagccgcgataaaggtctgcacggtaagctgaaagcgggtgtctgttatagcatgctcgacaccattaacagccgccaccagcgcgtggtggtcggtgtgcgtctgcaacaggttgccggacgcgatcgtaaagtggatatcaagccgtttgccattcagggactgccgatgagcgtgcagccgacacagctggtgaccgaaaccctgaacgaacgccaggcgcgcgtgctgccgcttaacgagctgaaagacaagctcgaggcgatggaaggcgtgcagtttaaacagttcaactccattactgattaccacagcctgatgttcgatctgggcatcatcgcgcgtcgtctgcgctccgcatctgaccgtagcaaattctatcgtctgatcgaagctagcctgtatggcgggatctccagtgccattacccgttctctgcgcgactacctgttgccagaaaacagcggcgtgcgtaaagcgttccaggacatggaagcggcgctgcgtgaaaaccgtatgacgctggaagcgattcgtgtcacccagagcgaccgcgacctgtttaagcatctgatcagcgaagccaccaactacgtggcggcggactacatgcgtcacgccaacgagcgccgtgtccatctcgacaaagccctggagtttcgtcgcgagctacatactagccgtcagcaactggcggctgagcagtacaaacacgtcgatatggcgcgtgagctggcagagcacaacggtgccgaaggcgatctggaagcggattatcaggcggccagtgatcacctgaacctggtgcaaaccgcactgcgtcagcaggagaagatcgaacgctacgaagcggatctcgatgagctgcagatccgtctggaagagcaaaatgaagtggtggcagaagccatcgaacgccagcaagagaatgaggctcgtgcggaagctgccgaactggaagtggacgagctgaaaagccagcttgctgactaccagcaggcgctggacgtccagcaaacgcgcgcgatccagtataaccaggcgattgctgcgcttaatcgtgccaaagaactgtgccatctgccggacttaaccgccgactgcgccgccgaatggctggaaaccttccaggcgaaagagctggaagcgactgaaaaaatgctctctcttgagcagaaaatgagcatggcgcaaaccgcgcacagccagtttgagcaggcttatcagctggtggtggcaatcaacggcccactggcgcgtaacgaggcgtgggatgtcgctcgcgaactattgcgcgaaggggtcgatcagcgtcacctggcagagcaggttcagccgctgcggatgcgattaagcgaactggaacagcgtctacgcgagcagcaagaagctgagcgtctgctggcagatttctgcaaacgtcagggcaagaattttgatatcgacgaactggaagccctgcatcaggaactggaagcacgcattgcctctctttccgatagcgtgtctaacgcccgtgaagagcgcatggcactgcgccaggagcaggaacagctgcagtctcgcattcagagtttgatgcagcgtgcgccggtttggctggcagcgcaaaacagtctcaaccagttgagcgaacagtgcggcgaagagtttacctccagccaggacgtcaccgaatatctgcaacagttgctggagcgtgagcgagaggcgattgttgaacgcgatgaagtgggcgcgcgcaaaaacgccgtcgatgaagagatcgaacgtttaagccagcctggcggctctgaagatcagcgtctgaacgcgctggcggagcgttttggtggtgtgctgctgagtgaaatttatgacgacgttagcctggaagatgcgccgtacttcagtgcgctgtatggcccgagtcgccacgccatcgtggtgccagatctgagtcaggtaactgaacacctggaaggcttgaccgattgcccggaagatctctatctgatcgaaggagatccgcagagtttcgatgacagcgtgttcagcgttgatgagctggaaaaagcggtagtggtgaaaatcgccgatcgtcagtggcgttatagtcgtttcccggaagtgccgctgtttggtcgtgctgcgcgtgaaagccgtattgaaagcctccatgccgagcgtgaagtgctttccgaacgcttcgccacgctctcctttgatgtacagaaaactcagcgtctgcatcaggcgttcagccgctttatcggcagtcatctggcggttgcgtttgagtctgacccggaagcagaaatccgtcaactgaacagccgtcgcgtcgaactggagcgggcgttaagtaatcatgaaaatgataaccagcagcagcgtattcagtttgagcaggcgaaagagggcgttacggcgctgaaccgcattctgccgcgtctcaacctgttggctgatgacagcctggcggatcgcgtcgatgaaatccgcgaacgtctggatgaagcccaggaagccgcgcgttttgttcagcagtttggcaatcaactggcgaaactggaaccgattgttagcgtattgcagagcgacccggaacagttcgaacagttaaaagaagattacgcgtactctcagcagatgcagcgcgatgcccgtcagcaggcgtttgccctgacggaagtggtgcagcgtcgtgcgcactttagctattctgacagcgcagaaatgcttagcggtaacagcgatctcaacgaaaaactgcgtgaacgtctggaacaggcggaagcggagcgtacccgcgctcgcgaagcgttgcgcggtcacgcagcgcagttgagtcagtacaaccaggtgctggctagcctgaaaagttcttacgacaccaaaaaagagctactcaacgatctgcaacgtgaattgcaggatatcggcgtgcgtgctgatagcggggcagaagagcgggcgcgtattcgccgtgacgagctgcatgcgcaactgagcaataaccgtagtcgccgcaatcaactggaaaaagcgcttaccttctgcgaagcggagatggacaacctgacccgcaaactgcgcaagctggagcgggattactttgagatgcgcgagcaggtagtgaccgccaaagcgggctggtgtgcggtgatgcgcatggtgaaagataacggcgttgagcgccgcttacaccgtcgtgagctggcttatctctccgctgatgatttgcgttccatgagcgataaggcgttaggtgcgctgcgtctggcggtggcggataacgaacatctgcgcgacgtgctgcgcatgagcgaagatccgaaacgtccggagcgtaaaattcagttcttcgtggcggtttatcagcatctgcgtgaacgtattcgtcaggatattattcgtaccgatgatccggtggaagctatcgaacagatggagattgaacttagccgtctgaccgaagaattaacctcccgtgaacagaaactggcgatcagttcccgcagcgtggcgaacatcattcgcaaaaccattcagcgcgagcagaaccgtatccgtatgctcaaccaggggttgcagaacgtaagctttggtcaggtgaacagcgtgcgtctcaacgtgaacgtgcgtgaaacgcacgccatgctactggatgtgctctctgaacagcacgagcagcatcaggatctgtttaacagcaaccgtttgaccttcagcgaagcgctggcgaaactgtatcaacgtcttaacccgcagattgatatggggcagcgcacgccgcagaccatcggtgaagaactgctggattaccgcaactatctggaaatggaagttgaggttaaccgtggttccgatggctggctgcgcgcagagtctggtgcattgagcaccggtgaggcgattggtaccggtatgagcattctggtgatggtggtacaaagctgggaagatgaatctcgccgcctgcgcggtaaagatatctctccttgccgcctgctgttcctcgatgaagcagcgcgactggatgctcgttctatcgccacgctgtttgaattgtgtgagcgtttgcaaatgcaactcatcatcgcagcgccggaaaatatcagcccggagaaaggcaccacctataaactggtgcgtaaagtcttccagaataccgaacacgttcatgtcgtcggcctgcgaggatttgcgccgcaactccctgaaacgcttccaggaactgacgaagcgccttctcaggcgagttaaaattaaggcggcagcaatgccgccttttctttttccgaaaactccgtttctgcactaaaaaagtggcacattacggcgcgcttttctttaaacttctttacattaggttatgtaaaaacgtatcggcgtttatatactgaagataagcctgatgagtaacaggcttgctcgtcatactttcgtgagtattggcgttgtacaggcaagtcgtaaaataacagcctggctattcagagtatgataaaaacagggggcaagggatgttgcttaatatgatgtgtggtcgtcagctgagcgcaatcagtttgtgcctggccgtaacattcgctccactgttcaatgcgcaggccgatgagcctgaagtaatccctggcgacagcccggtggctgtcagtgaacagggcgaggcactgccgcaggcgcaagccacggcaataatggcggggatccagccattgcctgaaggtgcggcagaaaaagcccgcacgcaaatcgaatctcaattacccgcaggttacaagccggtttatcttaaccagcttcaactgttgtatgccgcacgcgatatgcaacccatgtgggaaaaccgtgatgctgttaaagccttccagcaacagctggcagaggtggcgattgccggtttccagccgcagtttaataaatgggtagagttactgaccgatcctggtgttaacgggatggcacgcgacgtggtgctctctgatgcgatgatgggctatctccatttcattgcaaatattccggtcaaaggcactcgctggctatatagcagtaaaccttatgcacttgcaacgccgccgctcagcgtgattaaccaatggcagctggcgctggataaaggtcaattgcctacgtttgttgcaggactggcaccgcagcatccgcaatatgcggcgatgcatgaaagcttactggccttactctgtgacaccaaaccgtggccccaactgaccggcaaagcaacgttgcgcccagggcagtggagtaacgacgtaccggcgttgcgcgaaatattgcaacgcacaggcatgttggacggggggccgaaaattactctacctggcgatgacacgccaactgacgcggtagtcagcccatccgctgttactgttgaaacagcagaaactaagccgatggataagcaaacgacgtctcgtagtaaacctgcgcctgccgttcgcgccgcctacgataatgaactggtggaagccgttaaacgttttcaggcatggcaaggattgggggcagatggtgctattggcccggcaacacgtgactggttaaacgtaacgcccgcccagcgtgctggtgtgttggctctcaacatccagcgattgcgcttgctgccaacagagctttctaccgggatcatggttaacattccggcctatagcctggtctactatcagaacggcaatcaggtgctggatagccgagtcattgtcggtcgccccgatcgcaaaacgccgatgatgagcagtgcccttaacaacgtagtggtaaacccgccgtggaacgtacctccaactctggcacgcaaagatattctgccaaaagtgcgcaacgatccgggatatctcgaaagccatggctatacggtgatgcgcggctggaacagcagagaagcgattgacccatggcaggttgactggtctacaatcacggccagcaatttaccgttccgcttccagcaggctccaggcccacggaacagcctggggcgctataaattcaatatgccgagtagtgaggccatttatttgcatgacacgccgaaccacaatctgttcaagcgtgatacacgcgcattgagcagtggctgtgtacgagtgaataaagcttccgatctggcgaatatgctgttgcaggatgcaggctggaatgacaaacgtatttctgatgcgctgaagcagggtgatacacgttacgtcaatattcggcagagcattccggtgaatctctactacctgacggcctttgttggtgcagatggtcgtacccagtatcgtacagatatttacaattatgatctgcctgcgcgatccagcagccaaatcgtaagcaaagcggaacaattaatcaggtaaatgaagtagttcggggaaatcagttgtcgtaataattagcatgattgggggcgattctctgcagcccccgtcactgctggggttgagtcatcttgacgtctgctttacgggcggttaaggtgcctcttgtgcgccagaagtgcatataaacgataacattgacctgtagacttgattatcatggacaaattcgacgctaatcgccgcaaattgctggcgcttggtggcgttgcactcggtgccgccatcctgccgacccctgcgtttgcaacactctctaccccacgcccgcgcattttgacactcaataatcttcataccggagagagtatcaaagcggagtttttcgatggcagaggctatattcaggaagaattggcaaaacttaaccattttttccgcgattaccgcgcgaacaaaataaagtccatcgacccaggattattcgaccagttgtatcgcctgcaagggttgttaggcacgcgcaaaccggtgcaactcatttccggttatcgttctattgataccaacaatgaactacgcgcccgcagccgtggagtagcgaagaaaagctatcacactaaaggccaggcgatggatttccatattgaaggtatcgcgttaagcaatattcgcaaagccgcgttatctatgcgcgcaggtggtgtaggatattatccacgtagtaactttgtgcatattgataccgggccagcacggcactggtaataattgcttaacgaaacaggggcagtatgaactatcgtattattccggtcaccgcattctcccagaactgtagtttaatctggtgtgaacaaacccgtctggccgcactggtcgatcctggcggcgatgcggaaaaaatcaaacaggaagttgatgacagcggcctgacactgatgcagatcctgctgacgcatggtcatctggaccacgttggcgcagcggcggaactggcgcaacattacggcgtgccggttttcggcccggaaaaagaagatgagttctggctgcaaggcttgcctgcgcaaagtcgtatgtttggtctggaagagtgccagccgctgacgccagatcgttggctgaacgaaggcgataccatcagcatagggaatgtgactttacaggtgttacattgccctgggcatacgccgggtcatgtcgtgttttttgatgatcgggcaaagctgctgatttctggcgatgttattttcaaaggcggagtagggcgcagtgacttcccgcgtggcgatcataatcaactgatttctagtatcaaagataaattgctgccactgggggatgacgtgatatttattccgggtcacggaccattatccacacttggttatgaacgcctgcataatcccttcctgcaagacgaaatgcccgtctggtaaggcacataaaaaagcccgcttttaatgctggcctggatttctggcaaagtgcgctttgtttatgccggatgcggcacgagcgccttatccggcctacaaaatcgtgcaaattcaaaatattgcaggggacgcgtaggcctgataagcgtagcgcatcaggcaatgttgcgtttgtcatcagtctcagcccgcttttcagcgggcttcattgtttttaatgcttacagcactgccacaatcgcttcgcacagcggagccatgttatctggtgtcatcccggccacatttacgcgaccagaagcaaccgcatatacgccaaactcttcgcgcagacgcagcacttgttcttttgtcaggccactgaaggagaacatgccgttctgtttgatgataaagctgaagtcgcggtttgcgcctttttcctgcagcgtattgacgaacaactgacgcatacgctgaatacgctggcgcatatcagtcagctcttgttcccaaatcgcacgtaacgcatcgttgctcaggatggtggcaacaacagaagcgccgtgtgctggtgggttagagtagttagcgcgaatcgccgctttcatttggctgaatgcgcgatcaacggtttcactgtcggcagcaaccagagtacaagcgccaacacgctcgttgtacaggccaaagtttttagagtaggaactggcaacaatcagctctttatgcatagccgcgaaagcgcgcagtccttcagcatcttcttccagaccacgggcaaaaccctggtaagcgaagtcaaacagcggtaaccagcctttctcaacggagagttgtgccagtgtttgccattgttccagcgtagggtcgataccggttgggttatggcagcagccatggaacagcactacgtcgccagcctgagcttcattcaggctgttaatcagtgcatcgaagtcaagagtgtgattttccgcatcataataagcgtattcacgaacttccagacctgcagagttaaagacgctcttatggttcggccagcttgggttgctcacccacacacgcttaacgctggtattttttgccaggaaatcggcagccacgcgtagtgcgccagtgccccccggagtctgtgccgtgcgagcacgtttgtcattgatcagggcgctacctttaccaaacagcagttcctgagtgcagcgaccaaattcagggatgccgtcaatgccgaggtaatttttggtggtttcattttcgagcagatactgttcagcctttttcacgctggtcagtaccggggttttgcccgtctcatctttatagacaccaatcccgaggttaattttgccgggacgttcatcggcacgaaacagatcggccaggcccagaatcgggtcggcaggagcggcggtaatgttctcaaacatgacgaggttccattatggttacagaagggaagtccgctatcagggtaacgggagatttacaaaattccaactattactgatgaaaacgcaggctgtttttgcaagacgtgagattgctctggaaggtataaaaaaaacaggaccaaagtcctgttttttcggcatttaacaaagaggtgtgctattagaactggtaaacgatacccacagcaacggtgtcgtcactacctacgcccagtttgttgtcagaatcgatctggttgatgatgtagtcaacataggtggacatgtttttgttgaagtagtaggttgcgcccacttcaaagtagttcaccagatcaacatcaccgataccttctacgtctttcgctttagatttggtgtaagcgatggacggacgcagaccgaaatcgaactggtattgcgcaactaacagaacgtcttgcgttttgttggcgaagccgctggtgtttgtaaatttattagtgatcggcgtagcgttacgggtttcaccgtagttcgctgccaggtagatgttgttcgcgtcgtacttcagaccagtagcccactgttcagcttttttaccgttgccaagaggttgagcttcttgcaggttggtacggtcagctgcaccataagcaccaacgataccaaagccttcgtattcgtagctgatagaaccgccaacaccgtcgccgttagaacggcgtgcagtgtcacgctcgtttttacccaggtactgaacagcgaagttcaggccatcaaccagaccaaagaagttggagttacgataggtagcaacgccgccaacacgaccaacgaagaagtcatcgctgtatgcagtatcaccaccaaattctggcagcatatcggtgtaacccagtgcatcataaaccacaccgtagttacggccgtaatcgaaagaaccaacgtcagcgtatttaagacccgcgaatgccagacgcgttttgttaccagtttgagcgtcagcgccttcagagttgttaccctggaagttatattcccactgaccataaccggtcagatcggaattgatttgagtttcccctttaaaaccaagacgggcataggtcatgtcgccattgccaccgtaactgttttcaccgttacccttggaaaaataatgcagaccaacagctttaccgtacagatctactttgttgccatctttgttatagatttctgcagcgtttgcagtacctgctactaacagagcagggacgatcactgccagaatattgcgcttcatcattatttattaccctcatggttttttttatgacacctgccactgccgtcaataagttctgtcaataaaaatttacggaactattgatgagagtttggtgtctttatgtgtctgcaggcatctttccattcaaactaacgtttcgctaccgtgaaagtgctacaaagataaagatttggtttcaaaaagaaaaaatatgtaaccaaaagtaaaatttaaggaactttgtgaacaccgtcatatttccatagagacgtgatgatatttacagcaattttaatctatttatatgatttccttatatttaaattaactaaacggaaattttgtttctgatggaaactttatcgacctggcacaaaatcttctttcagacatccagaatgccaaaaaatagtatgaaaattgtgctattagctaagaaaaaactaatccgcaataagaatgcggattagtttttgcgcgtaaatgttgcaatgtaatattccgtaacaggatgatcgttatggcggggttgcaaatagattgcttgacttaacaaacagataacttgacagaaaagataaaaaaagagccagcgggcgctggctcttgaagacgctaaattagaagctggcgttacgcggagtacgtgggaacggaatcacatcacgtacgttttgcacgccagttacgtaagcaatcagacgttcaaaaccaagaccgaaaccactatgcggaacagtaccgtagcgacgcagatcgcgataccaccagtaatcttctttattcaggcccatttccagcatacgctcgtccagcacgtccagacgttcttcacgctgggagccaccaatgatctcaccgatgcccggagccagaacgtccatagccgcaacggttttaccgtcttcgttaaggcgcatatagaacgctttaatatctttcggatagtttttaaccactaccggtgctttaaagtgttcttccgccagataacgctcatgctcagaagagagatcgactccccagtaaaccgggttttcaaacttcctgccgcagttttcgagaatggtcactgcgtcggtataatccacctgcgcaaaatcggcttcaatgaagcgttccagacgactaacggcatctttatctacgcgttcagcgaagaatttcatgtcgtcagcgcgttcttcgagaaccgctttgaagacatatttcagcatggcttcagccagacccgcaatatcgttcaggttagcaaacgccacttccggctccagcatccagaattccgccaggtgacggctggtgttggagttttcagcacggaaagtcgggccgaaggtataaattttggacaatgcgcaagcgtaggtttcgccgttcaactggccagatacggtcaggaaagactctttaccaaagaagtctttgtcgaaatccactttgccctgatcgttacgcggcaggttttccagatccagcgtagaaacgcggaacatttcgcctgcaccttcggtatcagatgcggtaatcagactcgtactaacccagaagaatccctgctcgttaaagaagcgatgcagcgcctgcgccagcgtatggcgaacgcgcgcgacggcaccaatcaggtttgtgcgcggacgcaggtgagcgacttcacgcagatactcaatgctgtggcgttttgccgccatcgggtaagtgtctggatcttcaacccaaccagcaacttcaaccttgctggcctgaatttcaaattgttgcccctggcccgggctcgccacgactttacccgtcacaatgacgctgcagccggtggtcagacgcaggacgtcttcattgtaattgggcagagaattattgatgacagcctgtacaggatcaaagcaggaaccgtcataaacggcgaggaaggagatgccagctttactatctcggcgggtacgtacccatccgcgcacggtgacttcgctgtcaacggctacacggccctggagtacgtcggctacaggcacaacgctcataatattctctctgttaatagtcggaaaaaataaacacttgtccacccgtaaatggggggatacctatgttacctggcatctgcaatcagacaagcagaattcgcaaatgcagcgaaagatttcggaattaaaggtaaaaaaagggagccgattagctccctgatgatattaactggcttttttaatatgcggaaggtcgaacgctttgcgcagcgcccgaacaaacgctttatcatggcagatagttttgccagggctgtcagaaagtttcgccaccggtttaccgttacactctaccaacttaatgacaatattcaggggttttacctgggggatatcgcaggtcaggcgagtcccaataccaaaacttaattgcacgcgggaagagaagtggcggtatagctcaaccgctttgcgtaaatccagattgtcagagaaaaccagcgttttactctgtggatcaattcccagcttttcataatgtgcaatggctttttcaccccattcaaccgggtcgccagagtcatgacgcaggccctgataccgactagcgaactcgacaccgaaatcacgcaggaaagcatccatagtgatgcagtcggttaatgcaatgccaagttggtcgggatactcttccagccaggcagcaagtgcagctcgctggctgttggctagatccgggctgatttgctgatgtgcctggaaccattcgtgtgcctgtgttcccatcggcgtgagggaaagccgacgcgccagatcgtagttgctggtgcccacaaaccaggattcctgttgcagacgcttaacgatggtttcttgtacttcgcgagaaaaacggcgacgggtgccaaaatccatcagatggaagcggctcatatcaagaccggcggttaacgcgctgaagtcgactaatttgctttccagcgtgtcgagggcttgcgcaacgtcggcctgcggactgcgatagcgatgtaccatttcactgataaccgccagcaaaggaacttcccagaggatgacttcacgccacgggccgcttaaacgaatatccagcttgccattatcgttggacacggtgacttgttccgggttaaagcggaactcgcgtaaccagttaagatagtcggccttaaagaaaggcagggcagaaagccactgatattcatcatcctgcaggcgcaggtgctgcatcgcctgaacctgttcacgaatagcatcggcataaatacccagcagatcgtcacctcggcaacgaaactccgccgcgacatgcacatcgtaatagtgatgaaacacggcttgctgcatatgcaacttataagcatctgtatccagcaagctgtgcagaacaggagaagcgaattgtgtcataggtgcgcagtagcgtcctcgtacaggagcgtttagtacaataaacatcttcaggaactgctggagtataccttgtttcgcaatttattgaaccccgatcacaccatatgccacctttctggtcgatggcattacgcggtgtatgttataaaaatgtagcaataaaggcgtttgtacctgaaaagatgaagattctgcatagcgcgatttacgcaacaggaatagactgaacaccagactctataaaagatgctaaaggttatttatgactcaacagccacaagccaaataccgtcacgattatcgtgcgccggattaccagattactgatattgacttgacctttgacctcgacgcgcaaaagacggtcgttaccgcggtcagccaggctgtccgtcatggtgcaagtgatgctccccttcgtctcaacggcgaagacctcaaactggtttctgttcatattaatgatgagccgtggaccgcctggaaagaagaagagggcgcactggttatcagtaatttgccggagcgttttacgcttaagatcattaatgaaataagcccggcggcgaataccgcgctggaagggctttatcagagtggcgatgcgctttgcacccagtgtgaagccgaaggtttccgccatattacgtattatctcgaccgcccggacgtgctggcgcgttttaccaccaaaattattgccgataaaatcaaatatcccttcctgctttccaatggtaaccgcgttgcgcaaggcgaactggaaaacggacgccattgggtacagtggcaggacccgttcccgaaaccgtgctacctgtttgcgctggtggcaggcgactttgatgtactgcgcgatacctttaccacgcgttctggtcgcgaagtagcactggagctgtacgtcgatcgcggcaaccttgatcgcgcgccgtgggcgatgaccagcctgaaaaactccatgaaatgggatgaagaacgctttggcctggagtatgacctcgacatctatatgatcgtcgcggtggatttcttcaatatgggcgcaatggagaataaggggctgaatatctttaactccaaatatgtgctggcccgcaccgacaccgccaccgacaaagattacctcgatattgaacgcgttatcggccatgaatatttccataactggaccggtaaccgagtgacctgtcgcgactggttccagctcagcctgaaagaaggtttaaccgtcttccgcgatcaggagttcagctctgaccttggttcccgcgcagttaaccgcatcaataatgtacgcaccatgcgcggattgcagtttgcagaagacgccagcccgatggcgcacccgatccgcccggatatggtcattgagatgaacaacttctacaccctgaccgtttacgagaagggcgcggaagtgattcgcatgatccacaccctgcttggcgaagaaaacttccagaaagggatgcagctttatttcgagcgtcatgatggtagtgcagcgacctgtgacgactttgtgcaggcgatggaagatgcgagcaatgtcgatctctcccatttccgccgttggtacagccagtccggtacaccgattgtgaccgtcaaagacgactacaatccggaaaccgagcagtacaccctgaccatcagccagcgcacgccagccacgccggatcaggcagaaaaacagccgctgcatattccgtttgccatcgaactgtatgataacgaaggcaaagtgatcccgttgcagaaaggcggtcatccggtgaattccgtgctgaacgtcactcaggcggaacagacctttgtctttgataatgtctacttccagccggtgcctgcgctgctgtgcgaattctctgcgccagtgaaactggaatataagtggagcgatcagcaactgaccttcctgatgcgtcatgcgcgtaatgatttctcccgctgggatgcggcgcaaagtttgctggcaacctacatcaagctgaacgtcgcgcgtcatcagcaaggtcagccgctgtctctgccggtgcatgtggctgatgctttccgcgcggtactgcttgatgagaagattgatccagcgctggcggcagaaatcctgacgctgccttctgtcaatgaaatggctgaattgttcgatatcatcgacccgattgctattgccgaagtacgcgaagcactcactcgtactctggcgactgaactggcggatgagctactggctatttacaacgcgaattaccagagcgagtaccgtgttgagcatgaagatattgcaaaacgcactctgcgtaatgcctgcctgcgtttcctcgcttttggtgaaacgcatctggctgatgtgctggtgagcaagcagttccacgaagcaaacaatatgactgatgcgctggcggcgctttctgcggcggttgccgcacagctgccttgccgtgacgcgctgatgcaggagtacgacgacaagtggcatcagaacggtctggtgatggataaatggtttatcctgcaagccaccagcccggcggcgaatgtgctggagacggtgcgcggcctgttgcagcatcgcagttttaccatgagcaacccgaaccgtattcgtagcttgattggcgcgtttgcgggcagcaatccggcagcgttccatgccgaagatggcagcggttacctgttcctggtggaaatgcttaccgacctcaacagccgtaacccgcaggtggctagtcgtctgattgaaccgctgattcgcctgaaacgttacgatgccaaacgtcaggagaaaatgcgcgcggcgctggaacagttgaaagggctggaaaatctctctggcgatctgtacgagaagataactaaagcactggcttgataaataaccgaatggcggcaatagcgccgccattcggggaatttacccctgttttctcaggcgagtttcagattcaccacgttgcatcacccgttgcaacacctccgcttccagctccgctaatcgcacgctccctaatcgacgcggacgggggatatccactgtcaaatccagaccaatttttccctcttcaattaacagcacccggtcagccatcgctaccgcttcgctcacatcatgcgtcaccaacagtacggtaaagccgtgctcctgccaaagactcacaatcaaatcctgcatctcgagtcgcgttaaggcgtccagcgccccgagcggttcatcaagcaacaataatcccggtcgatgaatcaacgctcttgccagcgccactcgctgtttctgcccgccagaaagtgcggcaggccattcccctgcgcgattctccagtcctaccgcagccaacgctcgacgtgcggcatcgcgccactggcctttaaggcctaacccaacgttatcaatcacgcttttccacggtagcagacgcgcatcctgaaacatcattcgcgtgtcttcctgaatttcagccagcggtgtggtgcccgctaacacatcgcctgcggttggcgtttccagacctgccagcaggcgcagcagggtacttttgccaccaccgctgcggcccaccaccgccacaaactgacctgccggaatatgtaaatccagttggttcaggacgatattttccgcgtaatgtttgcttactgcattgagcaacaatggcgtgccctggttcagacgagcagtattcataccgtggcctccttcaaatgataagccgggttccagcgcaaccagaggcgctctaacagctgcgcgctgacgtcagccagtttgccgagcagggcgtaaagaataatagcgactaccaccacgtccgtttgcaaaaacccccgcgcattcatcgccagataaccaatgccactattggcagaaatggtttcggcaacaatcagcgtcagccacatcaggcccaacgcaaaacgcacgccgaccataatactgggcagggcaccaggcaggatcacatggataaacagcggtatgccggataatccatagctacgcgccatctccaccaacccgcgatcgatattacggatgccatgccaggtgttgatataaatggggaatagcgtaccgagcgccaccagaaagatttttgcggattcatcaatgccaaaccacaaaatcaccagcgggatcagcgccagatgcggcacgttgcgcaacatctgaatactggtatccagcagccgttctccccagcgagatagcccgctaatcagtcccaaaatcaaccccaggcttccgccaatactaaagccaatcagcgcccgccaggagctgatcgccagatgctgccacagttcgccgctggcggagagcgtccagaacgccgtcaccactccttccggactaggcaaaatacgcgtgctcagccagccaacgctggaggccagttgccacaccgccacgatgcccaccggtaaaaaccagggggcaacgcgcaataaccacttcttcactggcgttgccattatttcttccttagctttgcgcgactttacgggggataaaatcattcgccaccgcttcgccttgcggattcagcggctgcggctggggaatttccgggatggcgacatccagaagcgggaacagcaactcgccaacccgatacgcttcttccagatgcggatagccgctaagcacaaaactgtcgatgccaagcgcggcatattcgttgattcgcgcagcgaccgtaggaccatcgcccaccagcgccgtcccggcaccgccgcgcactaagccaacgcccgcccataaattggggctgatctccagattgtcgcgcttgccgttatgtaacgccgccattcgctgttgccctacggaatccgtccgggcgaatgcggcctgtgctttggcgatagtttcatcatcaagatggctgattaaccgctcggcggcctgccacgcttcgtcgttagtttcacgaacaatcacatgcagacgaataccgaaacgaattttgcgtccatgcgcggcagctttcgcccgcacttgttcgattttctctttaaccagttccggcggttcgccccaggtgaggtagagatcaacctgttctgccgccagctcctgggcgacatcactgcttccgccaaagtaaagtggcggatacggctgttgaatcgccgggaagagcagttttgctccgcgcacatgaatatgtttaccgttgaaatcgacggtttctctctgcaataaacgccgccagacctgggtaaattccgcgctggcttcgtagcgctcgctatgatcaaggaacactccgtcgcctgccagctcttgtggatcgctgcctgtgaccaggttaaacaacgcacgtccattactgagacggtcaagcgtggcggcctggcgggcggcaacggtaggactggttacgctgggacgcagggcgacaagaaacttcagccgctgcgtcaccgggatcatgcttgcggcaaccagccacgcatcttcgcaggagcgccccgttggaattagcacaccggtatagccaagacgatccgccgcttgcgcaatttgttgcagataaccgtgatcaaccgggcgactaccttcttccgttcccagataatgcccgtcaccgtgggtcggtaaaaaccagaacatattcagactcataattgttttccttccagttgagtgggctgccagatgcgctggcgaatatcgacttttttcggcaccagacgattttcataaaacagatctgccgtttgctgctgtaaggcggcaacctcggcgttaaccggtttgatggtggtaggagggcgatgatctaagtaagaggcaatcaccggtgccggtaagcccatcgtttttgccagtaaagcgatgctttgctcgcgctggctgcgggttaacgcatcggcctcactaaaggttgccagtacgccctgaataaaagcgccgtttttttctgcatagggacgagctgccagataaaagcttccagtttgattgagatcggtgccgtctttcagcacccgcacgccgccctgtaataatgcagcagagtagtagggatcccagatagcccaggcgtcaacgttaccttgctggaacgcggcgcgggcatcagcgggcgtcaggtaagtgggttggatatcggtaaacttaagtccggcctgacgcagtgcacgcagtaaaaggttgtgactactggaacctttctgaaaggcaactttgtgacctttaagatcggctacggttttgatcgggctgttttctgccaccagaatcacttcggctttgggcttcggtggctcgacgcccacgtacaccaaatcagccccggcagcctgggcaaagattggcggaatatccccggtactgccgagatcaatactgccaacgtttaacgcttccaacatttgcggacccgcggggaactccacccaggagattttactttccggatagcgtttttccagtaactggtggctttttgccagcaccataccaatactgcctttctgatagcctatacgtaacgcttcagggctggattctgcagcaaccgcaaaagtagagacgctaagcaatcccgccagcgccagtttaatgatgttacgcatgggcattacctcgcagagacagaaggtcaggaacctgaacatcgcggcggtgcaatgcctgccagaaagtttctagcgcggtatcaagacgggtttgcagatttggcgtgaactggggtctgtgatggtaatcaattacttgactgtcatcggcaaacacgccgtgcaggatctcctgagctttcagtgcgcttaaaactggtttaagggcataatcgaccgccagcagatgggccacggtaccgcccgtcgccagcggtagcaccactttgccttgcaaagcgcgttctggcagcaggtcgagcagggttttcaacgcaccggaataggcggctttatacacaggcgtggcgacaatcagcccatcggcctgttgcagctgttcggtgaaggtcttgagtgccggactatcgaaacgagcataaagtagatcttccggggcgaagttttgcagattccagtgataaacctctacatccaggccatttagtttttcccgcgcatattccagcaaggagctggagcgagaaggaaagcgaggactacccgccagggtgatgacacgcatactctctccttataaccaattgttctttttttgttaacattgataacaattcggtcagtctgtcggagagacaagaaaattccaaatataaattttgtgtatctttttctgaaaataaactaaagaaagggctttatatatcacgcatatttatttattggatagtcattagatgttgaatcaatgaattactcgttcagttaatatttaaatattcatgaaatctataaattaaagatttgtcacttattggatttagtatgcttgatttaaatggcggacaattattgttattattaagtctaatgtcatttaaaggcattatcatatttacgaagagatcaggatgataacgatgaaaaaaagtgtattgacggcgtttataactgtggtatgtgcaacgtccagcgttatggctgctgatgataatgctatcacggatggcagtgtaacatttaatggtaaagttattgctccagcttgtaccctggtagctgcgacgaaagattccgtggtgactttgccagatgttagtgccacgaagttgcaaaccaatggtcaggtttctggcgtgcaaattgatgtgccaattgaattaaaagattgtgatactaccgtaacaaaaaatgcaacgttcacctttaatggcactgcggatactactcagattacagcgtttgctaaccaggccagttctgatgctgctacaaacgtggccctgcaaatgtatatgaatgatggtacaacggccatcacgccagacacagaaaccgggaacattttgttgcaggatggagatcagacgttgacttttaaagttgattatatcgctacggggaaagcgactagtggtaatgtgaatgcggtaacaaatttccatattaactattattaatagaactcattaattgttttattaattagtacccctccagtgttctggaggggatattcatattttttaagagtgactatttatgaaaacttgcataacaaagggaattgtgaccgtaagtttaacggcaatattactcagctgcagttccgcatgggcggcaggtaaaggcgggattggacttgcagcaacacgtcttgtttatagtgaaggtgaagagcaaattagtctgggtgtacgtaacaccagtccggatgttccttatcttattcagagttgggtgatgaccccagataataaaaaaagtgcagactttattattacaccaccgctatttgtgctgaatccggcaaatgagaatctgttacgcattatgtacattggagcgccgttggcgaaagacagagaaacccttttcttcactagcgtacgggcagtccctagtacaacgaagcggaaagagggaaataccctgaagattgccacacaaagcgtcatcaaacttttctggcgaccaaaaggtttagcgtatcccttaggcgaggctccggcgaaactgcgttgcactagcagtgctgacatggttacggtcagtaacccaacaccttatttcattaccctgacagacctgaaaataggtggaaaagtagttaaaaatcaaatgatttccccctttgataaataccaattttctctgccaaagggggccaaaaatagcagcgtaacgtatcgaaccatcaatgactacggggcggaaacgccgcaactcaactgtaaaagctaagccgtcttcagttaagagagcgagatgtatagaactcatcgacaacacagcctgttaagctctggtggagtgccaagctttattggtgggctggtggtgtttgtgagcgcagcgttcaatgcacaagctgaaacctggttcgatcctgcttttttcaaagatgatcccagtatggtggccgatttgtctcgtttcgaaaaaggacaaaaaataacgccaggggtttatcgtgtcgatattgttctgaatcagacaattgtagatacgcgcaacgtcaattttgttgagataacgccagagaaggggattgccgcctgtttgacgactgaaagcctggatgcaatgggtgttaatactgatgcgtttccggcttttaaacaactggacaaacaagcgtgtgtgccattggcggagattattccggatgccagcgtaacgtttaatgtgaataaactccgtctggaaattagtgtaccgcaaatcgccatcaaaagtaatgcccgtggttatgtcccccctgaacgttgggatgaagggatcaacgcgctattactgggatatagctttagcggggctaacagtattcatagcagcgcagacagtgattctggcgacagctattttctgaatttaaacagtggcgttaatttaggcccatggagattgcgcaacaatagtacatggagtcgtagtagtggccaaaccgcagaatggaagaatctcagcagctatttgcaacgggcggttattcctctgaaaggcgaactgaccgtaggtgatgattatactgcaggcgattttttcgatagtgtcagctttcgtggtgtgcagctggcgagtgatgacaacatgctgccagacagcctgaaagggtttgcgcctgtggtgcgtggtatcgccaaaagcaatgcccagataacgattaagcaaaatggttacaccatttaccaaacttatgtaagccctggtgcttttgaaattagtgatctctattccacgagcagcagcggtgatttgttagttgaaatcaaagaagcggacggcagcgtcaatagctacagcgtaccgttctccagtgtgccattactccagcgtcaggggcgaatcaaatacgcggtgacactggcgaaatacagaaccaatagtaatgaacagcaggagagcaaatttgcccaggccacgttgcagtggggcggaccgtggggaacgacctggtatggtggtggacaatatgctgaatattaccgtgccgccatgtttggtctgggatttaacctcggcgatttcggagcaattagcttcgatgcgacccaggcgaagagtacgctagcagatcaaagcgaacataaaggtcagagttatcgttttctgtatgccaaaacgctcaaccacttgggcactaactttcaattgatgggctatcgctatagcacgagcggtttctacaccctttccgacaccatgtataaacatatggatggctacgaatttaatgacggtgatgatgaagatacgccgatgtggagccgttattacaatttgttttacaccaaacgtggcaaactgcaggtcaatatctcccagcaattaggcgagtacggtagcttttatttaagtggtagccagcaaacttactggcatacggatcaacaggatcggctattacagtttggctacaacacgcaaattaaagatcttagcctggggatttcctggaactacagtaagtcccgtggtcaacctgatgctgatcaggtgtttgctctaaatttttccctgccgctcaatctgttgctccccagaagtaatgatagctataccaggaaaaaaaattacgcctggatgacctctaacaccagtatcgataacgaagggcacactacacaaaacctgggtttaacggagacattactcgatgacggtaacctgagctacagcgtgcaacagggatataacagcgaggggaaaacggctaatggtagcgccagcatggattacaaaggggcgtttgcggatgcccgagtgggctacaactacagcgataacggcagtcaacaacaactgaactacgctcttagtggcagtttagttgcccatagtcagggcattaccctggggcaaagcctgggggaaactaacgttctgattgcagcaccaggcgcagagaatactcgtgtggcgaacagcaccgggctgaaaactgactggcgcggatataccgttgttccttatgccacttcttatcgggaaaatcgaatcgcacttgatgcggcgagcttaaaacgtaacgtggatcttgaaaatgcagtagtcaacgtggttcccaccaaaggggcgttggttctggcggagttcaatgcccatgcgggtgcaagggtattaatgaaaacaagtaagcagggtataccgctgcgttttggcgcgatagcgacgctggacggcgtacaggctaatagcggcataattgatgatgatggcagcctctatatggcgggtttaccggcgaagggaacaataagcgtgcgctggggcgaagctcccgatcaaatttgtcatatcaattacgagcttaccgaacaacaaattaactctgcgattacgcgaatggatgccatatgcagataatctttggagaaaaatgcgtgagtttactacgactattttttgccgccgtcttaatgttatggtgcgctcaaaccgctgcttatagcgggcagtgtcatactactcaggggaatccgtatattggcgtcaattttggcgttaaaaccctggaggaagaagcaaatacggcaggggtagttaaagacaaattttatcagtggaacgaaagcaatgattattatgtttcctgtgattgcgataaagacaatgtcagaagtggccgatgggcattcgccgcggatagtccgttagtctatttaggcgacaactggtacaaaattaatgactatcttgccgccaaagttttattgcaggttaaaggcagttctcctactgcggttcctttcgaaaacgtgggcacagggggggatacccgatggcatatttgcgaccctggcggtcaacgtttaggtgggcagggggcaagcggtaatagcggtagcttttccctgaaaatattgcagccgttcgttggcagcgtcgtcattcctcctatggcgctggcgcgattatatgaatgctacaacatacccgcaggtgattcctgcacgactacaggtacaccggttttagtgtattacctgtctggtacgatcaatagtcttggcagttgttccgtcaatgccggagagacaattgaagttgatttaggtgatgtcttcgctgccaatttccgtgttgtagggcataaacctcttggggccagaacggcagaacttgcaattccagtcaggtgtaacacgggaaacgcgggattagttaatgtcaacctgagtctgacggcaaccacagaccccagctatccccaggcgattaagacgagtcgtcctggcgtgggcgtggtggtgaccgatagccagaacaacattatttcccctgctggtggaacattaccgctctctattcctgatgatgcagacagtatcgcgcgaatgaatgtctatccagtcagcacgacaggtgtaccaccagaaaccgggcgatttgaagccacggcaacggtgagaataaattttgattaacgcgtgaacgtatgaagaaaaaaacgatatttcagtgcgttatcttgttctttagcattcttaacatccatgtcgggatggctgggcctgaacaagttagtatgcatatttatgggaatgtggtcgatcagggctgtgatgtcgccaccaaaagtgcattacaaaatattcatattggtgattttaatatcagtgattttcaggccgcgaataccgtaagcactgctgctgatttgaatatcgatatcaccggttgtgccgctggtattactggcgcggacgtcctttttagcggcgaggctgacacccttgcgccgacactgctcaaactaactgacacaggcggaagcggtggtatggcaacggggattgccgtgcaaattcttgatgcgcaaagtcagcaagaaatcccgctcaatcaggtccagcctcttacgcccttaaaagccggggataacacactcaaatatcaacttcgttataagtccacaaaggcgggagcaacgggcggtaatgcgacggcggttctctattttgatctggtttaccagtgaaggagtgatgttgaaacggataatctggattctgttcttattgggattaacgtggggctgtgagctatttgcccatgatggcacggtcaacattagcggaagctttcgccgtaatacatgcgtgctggcacaggatagcaagcaaatcaatgtgcagttaggcgatgtcagcctgacacgtttttctcatgggaattatggcccggagaaatctttcatcattaatttgcaggattgcggaacagatgtcagcacggttgacgtcacctttagtggaacccccgacggagtgcagagcgaaatgttgtccattgaaagtggtacggatgcagccagcgggctggcaattgcgattctggatgatgcgaagatattgattccgcttaaccaggcgagtaaagactacagcctacatagcggtaaggtgccattaactttttatgcgcaattgcgacctgtcaatagcgatgtgcagagcggtaaagtgaatgccagcgcgacatttgtacttcattatgactaatacgtggaacagattggcgctcttgattttcgccgttttaagcctgctggtggcgggtgaattgcaggcaggagtggtggtcggcggaacgcgatttatctttccggcagacagagaaagcatatctattttactgactaataccagtcaggaatcctggcttattaacagtaaaatcaaccgcccaacgcgttgggccgggggggaagcgagcacagtgccagcaccattactggccgctccgccacttattctcctgaagcccggtacgacaggcacgttgcgcttgctgagaacggaaagcgacatcttgcctgtggatcgcgaaacgctatttgagttaagcattgccagcgtgccatccggcaaagttgaaaatcagagcgtaaaagtggcgatgcgcagcgtatttaaactgttctggcgacccgaaggtttgccgggcgacccgctggaagcttatcaacaattacgctggacacggaatagccagggtgtacaactcactaacccaacgccttattacattaacctgattcaggtgagtgtaaatggtaaagcgttaagtaatgtgggagttgtgccgcctaaaagccagcgtcagacaagctggtgtcaggcaatcgcaccgtgtcatgtcgcctggcgggcgataaatgattacggcgggttgagtgcaaagaaggagcaaaatctgccctgaaacaggttcggaaaacgtttgcgttttttttgccgcaggtcaattcccttttggtccgaactcgcacataatacgcccccggtttgcacaccgggaatccaggagagttcatgtactaccccttcgttcgtaaagcccttttccagctcgatccagagcgcgctcatgagtttacttttcagcaattacgccgtattacaggaacgccgtttgaagcactggtgcggcagaaagtgcctgcgaaacctgttaactgcatgggcctgacgtttaaaaatccgcttggtctggcagccggtcttgataaagacggggagtgcattgacgcgttaggcgcgatgggatttggaagcatcgagatcggtaccgtcacgccacgtccacagccaggtaatgacaagccgcgtctctttcgtctggtagatgccgaaggtttgatcaaccgtatgggctttaataatcttggcgttgataacctcgtagagaacgtaaaaaaggcccattatgacggcgtcctgggtattaacatcggcaaaaataaagatacgccagtggagcagggcaaagatgactatctgatttgtatggaaaaaatctatgcctatgcgggatatatcgccatcaatattagtagcccgaataccccaggattacgcacgctgcaatatggtgaagcgctggatgatctcttaaccgcgattaaaaataagcaaaatgatttgcaagcgatgcaccataaatatgtgccgatcgcagtgaagatcgcgccggatctttctgaagaagaattgatccaggttgccgatagtttagttcgccataatattgatggcgttattgcaaccaataccacactcgatcgttctcttgttcagggaatgaaaaattgcgatcaaaccggtggcttaagtggtcgtccgcttcagttaaaaagcaccgaaattattcgccgcttgagtctggaattaaacggtcgcttaccgatcatcggtgttggcggcatcgacagcgttatcgctgcgcgtgaaaagattgctgcgggtgccagtctggtgcaaatttattctggttttatttttaaaggtccgccgctgattaaagaaatcgttacccatatctaattatttcttcgaattcctctttataagataatcagggctttattttcagccctggttgttttatattcatcgctgttgcttatttagacattttgtacttttattgttgaggttattaagcgaagcgacaatggattgtgttgctgcggttttatagggtaggggagaggcagatgcgaattaaaccagacgataactggcgttggtattacgatgaagagcacgatcgaatgatgctcgatttagccaatggtatgctatttcgcagtcgttttgcgcgcaagatgttgactccagatgccttttctcccgcaggcttttgcgttgacgacgccgcgctctatttctcttttgaagaaaagtgccgcgattttaatttatctaaagaacaaaaagccgaactggtgctgaatgcactggtagcaattcgctatctcaaaccgcaaatgccgaaaagctggcattttgtttcccatggtgaaatgtgggtgcccatgccgggcgatgcggcctgcgtttggttgagcgatactcacgagcaggtcaatttgctggtcgttgaatctggcgaaaatgccgcactatgcctgctggcacaaccctgcgttgttattgcgggtcgcgcgatgcagttgggcgacgccattaaaatcatgaacgacaggctgaaaccgcaggttaatgttgacagcttcagcctcgaacaggcagtttaacgcgccaacttaagtgcagtcttcggtacacagctacagcaaagaatggtgccatcatcgcccattgcactttttttcagcggcgtgacttcgccttctaaaagctgaacacggcaacttccacaaatgcccgcgcggcaagaataagggatacgaattccctgattttctaattgctccagcaacacctgttggttatttccacgaaatgcctgtccctgccagtcaatatctacatttgcgtccggttgttgcgtgatgttggcggtatcatcagcggcagctgcgccgtaaatttttgccggagccgttgccagaatttccacctcatcgccaacgcgaatcacgccgctattacgggcaattaaattctgaccaaaatcgacatcgccgttatcctgggcagtgcggaaagattgcaatgtttttaatggttcgcctgccggatgtttttgccctttttctgggctgacggtggtgaaaatacagcggctacaaggtttaaccacatcaaacaccacatcaccaatgcgaatcactttccagcgatcttcttcccaggcactcgcgccggaaaccaccagattggggcggaattgctccatttttacactggccggacaacgttgttggagatcacgtaagctggcttcgttagcaagaaggtaaggatagccatcagcaaaactcagaggtacagtgttgtggcgtttcacgcgccgggtcatttgtggccccacccagcgtaattgcacttcgcgggagaaaaatccacttagccatttgttgatcgcgtctggcgcaattcgcgcggtaaaatgtgtgccccaaacttcggttggtgcgtcttgtgtggcgaaatcagcaaaacgaacatatgcgctactgccatctggtgcggtgagatgcaagccatcatgcacaggactaggagtaaaccgtaccatctggggaaactggcgagcggtaataaacgtaccgtcaggttccgtgatcataaagatgcgatcgaaggccagaccactgacatctgccagagcatgtgtaagaccaatgccgcgcatgcttttaacaggatgaataaaaagccggattaatgtcgccacggtgcggtcctcaaatgaaaataagccctcaactttatgacatgacgcgcttattagctataatgcgcaacaattttcttagcgcctgtcccattaggctattttatttgtcagtttggccctgggttatgctcgaaatcctcacgtacttgtgtacgctccggtttctccgcgctgtccatgtccagactgactgcaacaattacgcctactgcggtaggctcttagagtaaaagtgacgatatgaattctctgtttgccagtacggcccgtgggctggaagagctgttaaaaactgaactggaaaacctgggggccgttgaatgccaggtggttcagggtggggtccatttcaagggcgacacacggcttgtttaccagagcctgatgtggagccgcctggccagccgtattatgttgccgctgggcgagtgtaaggtttacagcgatttagacctctatctcggtgttcaggcgatcaactggacagagatgtttaatcctggcgcgaccttcgctgtccacttcagtggtttgaatgacaccatccgcaacagtcagtacggcgcgatgaaagtgaaagacgcgatcgtcgatgctttcacgcggaaaaatctgccgcgtccaaatgttgatcgcgatgcgccggatatccgcgttaacgtctggctgcataaagaaaccgccagtatcgctcttgatctgagtggtgatggtttacatctgcgtggctatcgcgatcgtgctggtattgcgccgatcaaagaaaccctggcagccgctattgtgatgcgatccggctggcagccaggaacaccgctgctcgatccgatgtgtggttccggtacgttgctgattgaagcagcgatgctggcgaccgatcgcgcaccaggcttgcaccgtgggcgttggggctttagcggctgggcgcagcatgatgaagctatctggcaggaagtgaaagcggaagcgcaaactcgcgcccgtaaaggcctggctgagtatagctctcatttttacggtagcgacagcgacgcacgggtgattcaacgtgcacgcactaacgcccgtcttgcggggattggtgaactgatcacctttgaggtgaaagatgtcgcgcaactgaccaatccgctgccgaaagggccgtacggcacagtgttgagcaacccgccatacggggaacgtctggacagcgaaccggcgctgattgcgctgcatagcctgctgggtcggatcatgaaaaaccagtttggtggctggaatctctctttgtttagtgccagcccggatctgctaagctgcttgcagctgcgtgcagacaaacagtacaaggcgaaaaacggcccgctggactgcgtacagaaaaattaccacgttgccgaaagcactccagacagcaaaccggcgatggtagcggaagactacaccaaccgcctgcgtaagaacctcaaaaaattcgagaagtgggctcgccaggaagggattgaatgttaccgcctgtatgacgccgatctgccagaatataacgttgccgttgaccgttatgccgactgggtggtggtgcaggagtatgcgccgccaaaaactattgatgctcacaaagcgcgtcagcgtctgttcgatattatcgctgcaaccattagcgtactggggattgcgccaaacaaactggtgctgaaaacccgtgaacgccagaagggcaaaaaccaataccagaaactgggcgagaagggcgagtttcttgaagttaccgaatataacgctcacttgtgggtgaacctgacggattatctcgatactggtctgttcctcgatcaccgcatcgcccgtcgtatgctcggtcagatgagcaaaggcaaagatttcctcaacctgttctcttataccggcagcgccaccgtgcatgcgggattaggcggtgcacgcagcaccaccaccgtggatatgagccgtacttatctggaatgggcagaacgcaacctgcgtctgaatggcctgaccgggcgtgcgcatcgcctgattcaggccgattgcctggcgtggctgcgtgaggcaaatgaacagttcgatctgatctttatcgatccgccaaccttctctaacagtaaacgaatggaagatgcgtttgatgttcagcgcgatcatctggcgctgatgaaagatttgaaacgtctgctgcgtgcaggtgggacgatcatgttcagcaacaacaaacgtggcttccgtatggatctcgacggcctggcaaaactgggactgaaagcacaagaaattacgcaaaaaacgctctcccaggatttcgcccgtaaccgccagatccacaactgctggctgattaccgcagcctgaaaggaatagtaatgagtttaatcagtatgcatggcgcatggctgagcttcagcgacgcgccgcttctcgataacgcagaactgcatatcgaagataacgaacgtgtttgtctggtgggccgcaacggcgcaggcaaaagcacgttaatgaaaatcctcaaccgtgaacaagggctggatgacggtcgcattatttacgagcaagatttgattgtagcgcgtctgcaacaggatccgccgcgtaacgttgagggtagcgtttatgatttcgttgccgaaggcattgaagaacaagcggaatatctgaaacgctatcacgatattagccgcctggtgatgaacgacccgagcgagaaaaatctcaacgaactggcgaaggttcaggaacagctggatcaccacaacctgtggcagctggaaaaccgcatcaacgaagtgctggcgcaactggggttagatcctaacgttgcgctgagcagcctttccggcggctggttgcgtaaagcggcattaggacgcgcgctggtgagtaatccgcgcgtgctgttgcttgatgaaccgacaaaccacctggatattgaaaccatcgactggctggaagggtttttgaaaactttcaacgggacgattattttcatctcccacgaccgtagctttatccgcaatatggcgacgcgcattgttgatctcgatcgcggcaagctggtgacctatccagggaattacgaccagtacctgctggaaaaagaagaagccctgcgcgtggaagaattacaaaatgccgagttcgatcgcaaactggcgcaggaagaggtgtggatccgccaggggatcaaagcacgccgtacccgtaatgaaggccgcgtacgcgccctgaaagcgatgcgtcgcgaacgtggtgaacgtcgcgaagtgatgggtaccgcaaagatgcaggtggaagaggccagccgctccggtaaaatcgttttcgaaatggaagacgtttgctaccaggttaacggtaagcaactggtgaaagatttttctgcccaggttctacgtggcgacaaaattgccctgattggtccgaatgggtgcggcaaaaccacgctgctaaaactgatgctcggtcagcttcaagcggacagcgggcgtattcacgttggcaccaaactggaagtggcttatttcgatcagcaccgcgcggaactggatcccgataaaacggtgatggataaccttgccgaaggtaagcaagaggtgatggttaacggcaagccacgccacgtattgggctatttgcaggactttctgttccatccgaaacgggcgatgacgccggtacgtgcgctttctggcggtgagcggaaccgcttgctgctggcgcgtttgttcctcaaaccaagcaacttattgattcttgacgaaccgaccaacgatcttgatgtcgaaacgctggaactgctggaagaactgatcgacagctatcagggcacggtattgctggttagccacgatcgtcagtttgtcgataacaccgttacagaatgttggatcttcgaaggcggcggtaaaattggtcgttatgtcggcggttatcatgatgcccgtggtcagcaagagcagtatgtggcgctcaaacagcctgcggtgaaaaaaaccgaagaagccgccgcggcaaaagcagaaactgtaaaacgcagcagtagcaaactaagctataaattgcagcgcgaactggagcagctaccgcaattgctcgaagatctggaggcgaagctggaagccctacagacgcaagtggcggatgcttccttcttcagtcagccgcatgagcagacgcaaaaagtgcttgctgatatggctgctgcagagcaggagctggagcaagcctttgaacgctgggagtatcttgaagcgttaaaaaatggtggctgatcgcaaaatagtcgatttaaacagagacagctgacaacggtaaaattgcctgatgaactgggtttatcaggcatgaaaaccaacactttgttagtcatctgtaaaatagcgcatcattaaggagtaccaatgtgcgaacatcatcatgccgcgaagcacatcctgtgcagccagtgtgacatgctggtggcgttaccgcgccttgagcatggtcagaaagcggcatgtccccggtgtggcacaacgttaaccgtggcgtgggatgcccctcggcagcgtcccaccgcctatgcgttggctgcactgttcatgctgttgctgtccaacttgtttccttttgtgaatatgaacgttgcaggagttaccagtgaaattacattactggaaattcccggcgtgcttttttctgaggactacgccagcctcggcacctttttcctgttgtttgtgcaactggttcccgcgttttgtctgataaccattctgttactggtgaatcgcgcggaattaccggtccgtttaaaagagcaactggcacgggtgctttttcaactcaaaacctggggaatggcggagattttcctcgcgggtgtgctggtcagtttcgttaaactgatggcttacggcagcattggggtaggcagcagctttctcccctggtgtttattttgtgtcctgcaactgcgcgcttttcagtgcgttgatcgtcgctggttatgggacgacatcgccccgatgccagaactgcgccagccgctaaaaccaggcgtcacggggatacgtcaggggctgcgtagctgctcctgttgtacggcaatccttcctgctgatgaacccgtgtgcccgcgttgtagtaccaaagggtacgttcggcgtagaaacagcctgcagtggacactcgcgctgcttgtaacgtccatcatgctgtatcttccggctaatattttgcccatcatggtgacggatttattaggcagcaagatgccgagcacgattctcgctggggtcattctgttatggagcgaaggctcttatcccgtcgctgcggtgatctttctggccagtattatggtgccaacgttaaagatgatcgccatcgcgtggctgtgttgggatgccaaagggcatggcaagcgcgacagtgaaagaatgcatttgatttatgaagttgttgagtttgtaggccgctggagcatgattgacgttttcgttatcgcggtgctcagcgcgctggtgcgtatgggaggtttaatgagtatttatccggcaatgggtgcattaatgtttgctttagtcgtcataatgacaatgttttctgctatgacgtttgacccgcgtttgagctgggatcgtcaacctgaaagtgagcatgaggagtcctgacagtatggaatctaataatggggaagccaaaatccagaaagtgaagaactggtctcccgtgtggatatttcctatcgtcacggcgctcattggggcctgggttcttttttatcattacagccatcagggaccggaagtgaccctgatcaccgcgaatgcggaaggaattgaaggtggcaaaaccaccattaaaagccgtagcgttgacgtcggcgtggttgaaagcgccacactggctgatgatttgacgcacgttgaaatcaaagcgcggctgaattccggtatggaaaaattgctgcataaagacaccgtcttttgggtggtgaaaccgcagattggtcgcgaagggattagcggcctgggaacgctgctgtctggagtttatatcgaactgcagccaggcgcgaaaggcagcaaaatggataaatacgatttgctggacagcccaccgttggccccgcctgatgcgaaaggtatccgtgtgattctcgatagcaaaaaagccgggcagctcagcccaggagatccggtgctgttccgtggctatcgggtaggtagcgttgaaaccagcaccttcgatacacaaaaacgcaatatcagctatcaactgttcatcaatgcaccttatgaccgactggtgaccaacaatgttcgcttctggaaagatagtggcattgcggttgatctgacgagtgcagggatgcgtgtggagatgggcagtttgacaacgctgctgagtggcggtgtcagctttgatgtgccggaaggtctggatttagggcagccagtggcaccgaaaacagctttcgttttgtatgatgatcagaagagcattcaggatagcttgtacaccgatcacattgattatctgatgttctttaaagatagcgtacgcggtctgcaaccgggagctccggtagagttccggggtattcgcctgggtaccgtaagcaaagtgccattctttgcgccgaatatgcgtcagacatttaacgatgattaccgtattccggtactgattcgtatcgagccagagcggctgaaaatgcagcttggcgaaaatgcggatgttgttgagcaccttggcgaattgttgaaacgtggtttacgcggaagcctgaaaaccggaaacctggtcactggtgcactgtatgttgatctcgatttctatccaaatacgcctgcaataaccggtattcgtgaatttaatggttatcagattatcccgaccgttagcggcggcctggcgcaaatccagcaacgactgatggaagcgttggataagatcaacaaactgccattgaatccgatgattgaacaggcaaccagtacgctttctgaaagtcagcgcacaatgaaaaacctgcaaacgacgctggatagcatgaacaagatcctcgctagccagagcatgcagcagttgccgacggatatgcagagtacgttgcgtgaattgaatcgcagcatgcagggcttccagcctggctccgcagcctacaacaagatggtggcggatatgcagcgccttgatcaggtgttgcgagaactgcaaccggtgctgaaaacgttcaatgagaagagtaacgcgctggtatttgaagcgaaggacaaaaaagatccagagccgaagagggcgaaacaatgaaaaagtggctagtgacgattgcagcactgtggctggccggatgcagctccggcgaaattaataaaaactattaccagttacctgtggtgcagagcggtacacaaagtaccgccagccagggcaatcgtctgttatgggtagagcaggtcactgttcctgactatctggcggggaatggtgtggtttatcaaaccagtgatgtgaagtatgtgattgccaacaacaacttgtgggccagcccgttggatcaacagttgcgcaacaccctggttgccaacctgagtacgcaactgcccggctgggtggttgcctcccagcctctgggaagcgcccaggacacgctcaatgttaccgtaacggagtttaacggtcgctatgatggcaaggtcattgtcagtggtgagtggctgttgaaccaccagggacaactgatcaaacgtccgttccgtctggaaggagtgcaaactcaggatggttacgatgagatggttaaagtgctggccggtgtctggagtcaggaagccgcttctattgcacaagagataaagcgtctaccttaattataaagatttgtaaatataaccgtctccggtatgttgcctgaggcggtttttttgtctctaacgtgcggaaaaatttgttcctcttcacattttttgtacaaccgacatgcccgtgtagctcacaaatatgacagtggcgtgaattttgcgcattgacggcagttatgattcgcggtattgcttaactgtgattgcacatttagtaatcactgttttcttttccaccagaaaccagtatgagggaaacgaggcatgaagagacaaaaacgagatcgcctggaacgggcacatcaacgtggttatcaggccggcatcgccggacgcagtaaagaaatgtgtccctatcagacgctgaatcaaaggagtcaatggctgggaggctggcgagaagccatggcggacagggtagtaatggcctgattctgtctctttaaaaagaaacctccgcattgcggaggtttcgccttttgatactctgtctgattataatcagaaggcagacgtatcctggaacagaccgactttcaggtcgctggcggtatagatcagacgaccatcaaccagcacttcgccatccgccaggcccataatcagacgacggttaacaatgcgtttaaagtgaatacggtaggtcacttttttcgctgtcggcagtacctgaccagtgaatttcacttcgccaacgcccagcgcgcggcctttaccttcgccgcccagccagccgaggtagaaccctaccagctgccacattgcgtccaggcccaggcatcccggcataaccggatcgccaataaagtggcatccgaagaaccacagatccggattgatatccagttctgcttcaacataccctttgtcgaagttaccacccgtttcggtcattttgaccacacggtccatcatcagcatgttcggtgctggcaattgcgggcctttagcgccaaacagttcaccgcgaccagaggcaagaaggtcttcttttgtataggattcgcgtttatctaccatgttctctgtaagccttattttattgaagcacgcaggatagctaacacgtgtacgctgaacaagtccgatcagttcggaataaaccagttcagccaacgtaatggccatggaaaacggtgacgtccttcctgttggcttgcttgcgcgatacgttcctggatggtttgcatcagcgtcgtttggccttcgccatcccacaccagatttaataataacggcagtgcgtcagtcacatcgtctactgcccagatggtgaatttgccttcttctaccgctttcaccagttcactgtgaagacttaaatggcgaacgttagctgtggggataatgacaccttgtttcccggttaactcacgttgctggcaaatagcaaagaagccttcgattttctcatttaaaccaccgaccggctgggcgcgaccgaactgatcgacactacctgtgatagcgatactctgattcaccggcacatcggcgagggcgcttatcagggcgcagagttcagccatgctggcactatctccatcaacttcactgtaactctgctcaaatgtcaggcttgcactgaaggggatctgttgctcaagctgtagttcgctcatcaggaacgcttgcatgatcatcatccctttcgcatggatattgccgccaagctccgctttgcgttcgatgtcggtgaattcaccatcgccaatatgcacaacgcagctaatgcgagaaggttcgccaaaagcgcgtggatgacccggaaattcaatgacgctaagggcgttaatttgcccgatgcgttcgccttcggtttcaatcaggatttgctcctgaaggatctcatcctgcatacgttcagcgaggaaaccttcgcgccattcacgctgctgcagcattaagtttagctgctcgccggagaaggtgtcgccatcacacagggaggcgacctctttacactggcggaggatccactgcgggctaagcggaagtgtttcttgttcaccggtgtagcgtgctgcttcgcggataagtatcggccaggcatccgctcccggtgcaggtaagtgattatgtctggcggtaaatgtcacccagcgacaccactgggttacactctccgcatcgacaatctgcagagtatcttcaaattcgctataaatagcctgctcactaagctctggctccatctcctggaaatcagccaaactttcgcgttcgcctaccagaatgactttcagcttcaatggcatgctaggcacagagacggggagagggcggctctcatcaaacgcaacccagtcaaaacgctcgcggttaacgatatttttcagccgcatccacagcagaggttgcgccagcagtgtacgcaaagagataatgagaataccgccatttgcctgatgcaccagaccaggctgcagggtaatgtcgccattaaactggcgcaggcagccaaagagttgctccgcttctacccagtcggcagcgacaacttgcgttaaagtcgcaaaattatcatctgcactcactgcgtgacgtaagcggatggagtggccggaaacctcatagtgaccgcccaccagttggcctgcatcgctttgtagcgtacgcgcggcattggcaataagattcagatactcagactcttccggggccttcgccagcataaaagaggaggatgctcgcgtatgcagcaactgctccagcgcaaattgcagccgcggttgagtatcactgaataaaggatcgttttcgtcaatcaaatgtggctgagcaaatatttcctgatagctatcggtatcaggaaccaggtcacgccatgcaagtttcgtaatggtcaaagttgatgttttttagtctgttgtcaaagccgcgattataccgtaaccggcactacagcacacgtagaaagcaccgacaatactcctggcatgggcgttaaagctcacaggatggagattcttttcttcactggcctaaaaagctgatattctgtaaagagttacacggtaacattgagatcgctatgaaatatcaacaacttgaaaatcttgaaagcggttggaaatggaagtatctggttaagaagcatcgcgaaggggagttaatcacccgttacatagaagccagtgccgcccaggaagccgtcgatgtgttgctcagcctggaaaatgaacccgtgctggtaaatggctggattgacaagcatatgaatccggaactggtcaatcgcatgaagcaaaccattcgggcaagacgaaagcgccattttaatgcggaacaccagcatacgcgcaaaaaaagcatcgatctggaatttattgtctggcaacgtctggctggtcttgcgcagcgtcgcggtaaaacgctttctgaaacgattgttcagctgattgaagatgcggaaaacaaagagaaatacgcgaataaaatgtcttctctgaagcaggatctgcaggcattgctgggtaaggaataactgacgaaagtcagttcaatttactaaaggcaaaaaaaaccccgcagcagcggggtttttctaccagacgagaacttaagcctgcggctgagttacaacgtctttgatacctttaacttcgatctctacgcgacgatccggagccaggcagtcgatcagtgcagcacgctgtttcacgttgtcacaggtgttgccagtaaccgggttggattcgcccataccacgtgcggagatcttgtctgccgggatacctttggagatcaggtaatcaacaacagactgagcacggcgctcggacagaccctggttgtaagcgtcagaaccgatgcggtcggtgtaacccagaacaactacggaaccgtctttcggatccaggttgctcagctggctgtacagctgatccagagcagcctgaccttccggtttcagggttgctttgttgaagttgaacagaacgtcagacttcagagtgaagtgcttggtctgtacttccggtgccggagctggagccggagcaactactggagctgcttcgccctgaccgaaacggtaggaaacacccaggctcagcatgccgttgtccggacgagtgccgatggtgtgtgcgtcaccgatgttgttggtccactggtattccagacgggtagcgatttcaggagtgatcgcgtactcaacaccgccagcgaagaccggagaaacgccggtgtcgtggtttttaccataaacgttggatttagtgtctgcacgccataccatgccacccagacgagtgtagatgtccaggtcgtcagtgattgggtaacccagtttagcggtcagttgaacgccctgagctttgtatgcaccgttttcaacgctgcctttgtacggcatacgacctaaccagtcgtaacccatttcaaagccaacatacgggttaacctggtaaccaccaaaagcaccagcgcccagttggttttcatgggtcgggccattgttgttgatgaaaccagtgtcatggtactgggaccagcccagtttagcaccagtgtaccaggtgttatctttcggagcggcctgcgctacggtagcgaaaccagccagtgccactgcaatcgcgatagctgtctttttcattttttgcgcctcgttatcatccaaaatacgccatgaatatctccaacgagataacacggttaaatccttcaccgggggatctgctcaatattaactctaccgatatcttcggcttatgccgagcacccctggcgatgtaaagtctacaacgtagttgaaaacttacaagtgtgaactccgtcaggcatatgaaaaaaaagtcttgtataaggtatgtttaatcttttttgtcagcgacaatttacagaagagaatcgcggaaaccgcttcagacaagcctccgcaaggaaaattagtcacgactgaaagcattggctgggcgacaaaaaaagttccaggattaatcctaaatttacttaatgatacaaattagagtgaatttttagcccggaaagttgtctcgtggcgtgagaggatgcgcttaccggacgcataataaaccccatagcgttaccttcatttgccgcatcaacaagttcagcatgctcttcttcagtcaaatcatctgccaaccaaccgatcaccacactgtaattgcccgtgcgtaaagcgcgaaccatactctccacagtgtggcaaggggagagctggctaatctgcattactttcgttaagggtagcccagatgcctgaacccattcccgactcagtttttgttgcggtgttaaccagagttgccagcggctttgctgaccgagttgctgtaacaatggcaacagtagaagttgcgtcatcatgggctgatcttcgcgatagacaacttcactgataagcccggctgtagtgttttccgtagagacacgcgcaattttacttgctgcggaactgaagctgctagaacgatgtgcatagccactagtgtacataatcaatccagcccctgtgagttactgtatggatgtacagtacatccagtgacaacaaagatcaaccctattttcggaaagagcctcgcaaattttgtcgttggtgacgggaaaacataaattaatcttgccccttaagaataagttgcctattttcgtagttaacggatccgttaatgtgaatcattcttttatgttatgattttaaaaggaattttatgaaaagcctctcctataagcggatctataaaagtcaagaatacctggcaacgttgggcacaattgaataccgaagtttgtttggcagttacagcctgaccgttgacgacacggtgtttgcgatggtttctgatggtgagttgtatcttcgggcttgtgagcaaagtgcacagtactgtgtaaaacatccgcctgtctggctgacatataaaaagtgtggccgatccgttaccctcaattactatcgggttgatgaaagtctatggcgaaatcaactgaagctggtgcgtctgagcaaatattctctcgatgcagcgctgaaagagaaaagcacgcgcaatacccgggaaagactgaaagatttgcccaatatgtcttttcatctggaagcgattctcggggaggtggggattaaggatgtacgggcgttacgtatacttggggcaaaaatgtgttggttgcgactgcggcagcaaaacagtctggtgacagaaaagattctgtttatgcttgaaggtgccattatcggcattcatgaagctgcgctcccggtggcacgccgccaggagcttgcagaatgggctgactctcttacgccgaaacaggagtttcctgcggaacttgagtaattacgcgctaacaggagtttcctgcggaacttgagtaatctggcgttgcagacgaccaatctcaggcagtaatgcaatcaataatccaacttgttgtacgaccagaggttctttgctgtctgcccgtggttcaagttgctgcatccgctgtttcaggctagctaatgcctcattgacgcgttcttcatcagcaggttgatgatgtaacgcgtcatcaacatagcaaactgcgtcatcaagaaacgccagaatttcaggattagttaactgctcccggtgagcaccgagggcactgatatagctggtaaacgtatggttaaggcacagcaaccgaaacgcggcttcgcgaatttgcggggtaacgttcggctcgctggacatattacttaccacgctcgccagctcagcatcacggttgtgtgcatcgcggcgggcaatacgatacgccagacggttatcacgcccctgatggtattgctccagtatggcatcgagataccgacagttggcctctgtggcacgttcgagcatgcgcggcagattgcgaaactgccagtcaggccagatgtagctcactgccgcccacgcaatggcacaaccaatcagcgtatcgattacgcgaggtaacgctacttcaaaaccttcacccagtaagttaaaacacagtagcaccaaaagtgtgatgaacatcgttgcatgagcgtattgcacgttacggaaggcaaaaaagagcacgccggtaataaccagcagcaccagctgcccttccagacttggcacaaaccacagcacaggaatgccaatggcgatacctaccagcgtaccaataatccttaacttcaggcggtggcgcgtggcgttatagtttggctggcagacaaacaaacttgtcagcaagatccaatacccgtgatgcattccggttatctgaatgatggcgtagccgaagcacaacaccaggctcattcttaccgcatgacggaagagggcggattccggcgtgaagtgacggctaagacgcagccagatatcactcaacccgtgcgggctgtcatcagcgagctcattttcgtcattattatggggtagtgcctgggcctgttcactttcaattgttgccagttgggcatcaatggcgcgtaaattgttcagcaaaaatcccagtgttttgagtaaatcggcgggtgcgccgttatcgcgcatccgctccagcgcagcatcaatatgcgtaaaagcgcgctcaaaatgcggatcatgttgataaggctgacgcaacaaaatacagcgactcagttgctggcacgcctggccctgcatgctcatcagccgctgaaaacggaacagcacgtcgctgtggcgaaaatgttcacgcaatgtttgatactgaatatgagaagagctggcacgctcgtgaatatcctgtgcgacaaagtaataatgcagcgtgcgacgcgttccccgttgaccacgatcgccacgtaagcgggtcagcaggctgagtttcgtctgattcaatgtcgccatcagcagaccgttggcgagagccaaatcgtacagcggtgcctggctttgatcttcaatatcaggatcaaacatgcggctcttgagctcaagataacgcgccagttgttcatagcaacgcgccaggttgtcctgcagcgggcggaccgggaacagcagatgaccaataagtgtcaggacgttgtaccagacggcaccggccagcagatacatcggctgctgataccagtgctcatacagacttgttcccaacatagtgtaaatggcgatcagcaatgcaccgaaggcaattgttgcatagcgttgacccagaccgccgagcaaaatgaagccgctggtagagagcgttaagccaatcgcaaatagccagggccagggaaacagcaattctacactggcgctggcgataaaaaagcagaacagcgtaatgatgaggttacgcaaacgtcccgccagtcggtcatcgagatcggtcagcgccgctgccaccatccccagcgttagcggaatcgtcagttttacatcacccagccaccacggaaacgctgtggttccacaaagcgcaataaaaatacgcgcgtaatacagccaggcgctgttccaggtatagcgtttgagcaaaggacttagcataaaggccatattagtggattattcaaaacgacgacgtgcattggcttcacgcgcagcttgcgctgtttctacgcttaccacgcgacgaccaaccggccatagtgcaatagcggcaattttaaagttcgcaatgccgacaggaatgccaatgatactaatacattgtgcgatgcccgttgcaatgtgcatcaggcataaccaccagccaaagaaaatcagccagaaaatattcaataccgtaccgccagtattcagcagcacatttttgccagccgggttcagttcatcgacatgaatagcttcattgccataaggcaccagagacagtttagtgatctcccagcaggatcgtgtcagcggtaaggtaaaaatcagcacaatactgaccagagtcgccaacagccagcccagagtggtggcaaatccgccaagcacaaagttcagaatgttcaaaacggtacgcataaaacctcgctttactgtggttttcagtaatgggcggcaattgtaacgtttttttgggctggagcacgttttctctgacggttacactgataagaaataatttcgtgtggatctacagagtcatggaactgaaagcgacaacgcttggaaaacgtctggcacagcacccttacgatcgggcggtgatcctcaatgccgggattaaagtctccggcgatcgccacgaataccttattcctttcaatcaattactggcgattcactgtaagcgcggtctggtatggggcgagctggaatttgtactgccggacgaaaaagtggtgcgtctgcacggcaccgaatggggcgagacgcagcgtttttaccatcatcttgatgctcactggcggcggtggagtggcgagatgagcgaaattgcgtctggtgttttacgccagcaactggatttgattgccacgcgcactggggaaaataaatggctgacgcgtgagcaaacctctggcgtgcagcaacaaatccgccaggctttgagcgcgttgccgttgccggttaaccgactggaagaattcgataactgccgtgaggcgtggcgtaaatgtcaggcctggttgaaagatattgaaagcgctcggttgcagcataaccaggcgtataccgaagccatgcttaccgagtatgcggattttttccgccaggtcgagtctagtccgctgaatccggcgcaggcccgggcagtcgttaatggcgagcattctctgttagtgctggcaggtgcaggaagcggaaaaacgagcgtgctggtggcccgtgcaggctggttgctggcgcgtggtgaagcgtcccctgagcaaattttattgctggcgtttggtcgcaaagccgctgaagagatggacgagcggattcgcgaacggctacataccgaagacattaccgcacgcacgtttcatgcgctggcgctgcatattattcagcagggcagcaaaaaagttccgatagtcagcaaactggaaaatgataccgctgcccgtcatgaactctttattgctgagtggcgcaagcaatgcagcgaaaagaaagcgcaggcgaagggctggcggcaatggctgacggaagaaatgcagtggagtgtgccagaaggtaacttctgggatgatgaaaaattacagcgtcgccttgcctctcgcctcgatcgctgggtaagtctgatgcggatgcacggtggtgcacaggcagaaatgattgccagtgcacccgaagagattcgcgatctgttcagtaaacgtatcaagttgatggccccgttattaaaagcctggaaaggtgcgctgaaggcagaaaacgctgtcgattttagcggccttattcatcaggcgattgtgattctggagaaaggtcgctttatcagcccgtggaagcatattctggttgatgaatttcaggatatcagcccgcagcgggcagcgttgttagcggcattacgcaagcaaaacagtcagacgacgttgttcgctgttggtgatgactggcaggcgatttaccgattcagcggtgcgcaaatgagcctcaccaccgctttccatgaaaactttggtgaaggcgaacgctgtgatttagacacgacttaccgttttaacagtcgtatcggtgaggtggcaaaccggtttattcagcagaacccaggccagctgaaaaagccgctaaacagcttaaccaatggagacaaaaaagccgtcacgttattggatgagagtcaacttgacgctttgctggataagctctctggttatgccaaaccggaagagcgcattctgatcctggcgcgttaccatcacatgaggcctgccagcctggaaaaagcggcaacacgctggccgaagttgcaaatcgactttatgaccattcatgccagcaaagggcaacaggcggattacgtcatcatcgttggcttgcaggagggaagtgatggttttccggctgcggcgcgggagagcattatggaagaggcgctactgccaccggttgaggatttcccggacgctgaagaacggcggttaatgtacgtggcgctgacccgggcacgccatcgggtatgggcactgtttaacaaagagaatccctctccctttgtggaaatactgaaaaatctggatgtgccggtggcgagaaaaccgtaagaaacaggtggcgtttgccacctgtgcaatattacttcagacggtccgcgagataacgctgataatcggggatcagaatatcgaccgcgtcgttgaaatgcgggctctggattatgaagtctgccgttgccacgttggtggcgaccggaatgttccataccgtcgccagacgcagcaaggctttcacgtcaggatcgtgcggcacggcatttagtggatcccagaagaaaatcaatacatcaattttcccttcactgatcaatgcgccaacctgctggtcaccccccattgggccactcaacatcgcgttgacgttcatgccggtcgcgcgggaaattaagttaccggtagtgcctgttgcatacagtacgtgttgttccagtaacggttgatgccgttccacccagctcatcagcatttgtttgcagtgatcgtgtgccaccagcgcaatatgtttccgcgcaggtaaagtgcgagtcgtcagttccataatgtacatccgtagttaactttcctacagattactgtaagcacttatcgctgcaagataaagaccgaaaaagcctgcgcacaggcacaaaaatctcaggaagatggttgtttttccgcccactgcaggaaagtatttcgcgtttgtgggtcagccagtttaaaccaatacttcagccgttgttctgtgagcacctgagactgcggtggaatagcatccagctcggaaacaccgctaagcagcgtactgtcatctgccatcatcgtggcaaattgcggtagactagcgcgtttcgcggatttgttatagcgttcaacctcgacctcataatcaatcgtttttgccgtactggtaatggcgagaatatccagctttaccggaatcggcgtcgcatcgccatccaacaattcaaggcgcggcgcggcatcaaaatggttagcttcccgctcattctccaggcgaggcaggcgaaaattgacctggttgatgagctgggtattaaaactgaccaccagcggtggggagatatacagccgttcttcactattggaaagatgaatcgtcttctcaacgcgaaacactaactgatgcggtccattatccagttcaatgctgtccgcaccgcgcagcagagagctggaaaccttcttgccgtcgagtaccagaagatcgacatcggtactaagccgcagcgtggtggcaaaaacggataccggcaaacataatgcaatcaaggtggtcacgatgccggttttcataggtagctcctgtcaaaagaccgcccgaataataatgtgtcaaaatttttctttaatcatacttactaacatatagacatatttcccgcttttgctctcattcattcgtattagctgcatggttggcatgtcggctttgtcgtacactttgttaaacagtctggaggaaataatgaaagaaaccgatattgcaggcattttaacgtccactcacaccattgcgctggtgggggcaagcgacaaacccgatcgtcccagctatcgcgtgatgaaatatctactcgaccaggggtatcacgtcattccggttagcccaaaagttgccggcaaaacgctgctgggccagaaggggtatggcacgctggcagacgttccggaaaaagtcgatatggtcgatgttttccgtaatagtgaagcggcgtggggcgtggcacaggaagctattgccattggcgcgaaaactctctggatgcaactgggggtgattaatgagcaagcggcagtactggcacgggatgccgggttaaatgtggtgatggatcgctgcccggctattgagatccctcgcctgggcctggccaaataaaaaatccccggaaggcaaaaaccttccggggatttgttcagggattagttacgcagacgcggggcctggagttgtttgcggatggtctgcgccagctcatccatggatggctgttcaggatgttcatcctgcaattcgctacttagctgggcttcagccaggtaggtatgaaccggtaggccgttatcgtcctccatcactacgtgataccacggagcggcgcgaagctcgtcattcaccgccagctcatcagggctcggttcagagaggctataaaccgggtcgatatccacgaccactccgagataacctaacagggaatggcggacctgctggccgataccgaatttgctggcaatcatagtcacctcccgggaaatctttacctttgatataagggtaaaattccacatttcaagttacatgacgcgacaggcaaaccctttcagatatagcccttccggataggtagcgatcaccggatgatcggctgcctgacggaactgctctataaattgtacatcacgaccggcatcaattgcggcatccgcgatgattttctgaaataaatcgctggtcatcagaccggaacaggagaaagtcaggagaataccgccttcattcagcagctgaatcgccagcatgttgatgtctttataaccacgacacgcgcccatcaactggcttttattctcaacaaacttcggcgggtccatcacgataacgtcaaatttttcaccgcgatcgcgataagtacgcagcaatttaaagacatcatcacggacaaactcagccttgctcagatccagtttgttcagctcaacgttctgccgtgcaatatccagcgcttcctgggaggtatcaacgctgacaacctggctgcaaccgcccatcagtgcgcttacggcgaaaccaccggtataggagaaacagttcagcacacgtttattttcaacgtagcggcgggtagccaggcggctatcacgctggtccaggtagtagcccgttttgtgtccgtgctgaatatccaccagcagtttcattccgtgttcttcaatcggcagcagggcaggtggcaactcgccggtgacggggccctgggtcagctccattccttcttttttacgtaccgcgacgtcgctgcgatcgtaaatgctacattccgggtacagcgtttgcagggcactaattaatgccgcgcgctgatattctgccccagcactcagcagttgcagcaccagaaaattaccgaaacgatcgatagtaatacccggcaggccatcagattctccggcgattaaacgatagctgtcgaggccatctttttgcgccagccagtcacgccatttttgtgcttgttgcaaacggcgggaaaaaaaagcaatgtcgatagactcagacgggtcaaacgtccagacgcgcgcccggatttggctagctgggctataagcgccgcgtgctaaccattttccctgatgatcaacaatatcgatggtttcaccgaggctggctttaccttccatgcgggcaacggccccggaaaagacccacggatggcgacgaagtaatgatttttcgcgccctttggctaacactaaacgtacactcataatttacttttctgtcgatgcaaagaaatgggcgtcattgtccggagttttccatggatttgcaacgcgtccattaaggataaggagagcagcaatgagcaaagtctgcataattgcctgggtttacgggcgagttcagggcgtaggatttcgctacaccacacagtacgaagcgaaaagactgggtttaaccgggtacgccaaaaatcttgacgatggcagcgtggaagtggttgcttgcggtgaagaagggcaggtggaaaaattaatgcagtggttaaagagtggcggcccgcgttctgcgcgtgtagaacgggtgctcagcgagccgcatcatcccagcggggaattaaccgattttcgtatccgttaaatacattttaccggttttggcaggccagcaattttggtggcttgcttagccggacctttcggaaacagtcggtataaatagcggctgttacctttttcttcgccaaatttattcgccatcgcttttaccagcatacgaatcgccggagaagtattgaattccagatagaaatcacgcacaaaacgcaccacttcccagtgttccggactcaggctaatcccttcgttctctgcaatcaccacagccagcggctcactccactggctgctttctttgagatagccttcggtatccgtttctatctctttaccttcgaagatcagcataattattactaccttaatcagactggcggcagtgtaacaaaaaacaaagccccgcataaagcgaggctatgaaagtgttagcgggtgagattaatcgcggctagcgaagcccagaatgctcagcaggctgacgaagatgttgtacaggctaacatacaggctaaccgtggcacgaatatagttcgtctcaccgccatgaatgatgttgctggtttcaaacaagatagcgccagaggagatcagaatgaagaccgcgctgatcgccagatgcagagcaggcagctgcaggaagatattcgcaaccataccaatcagcaccaccacaatacccgccatcagcataccgccgaggaagctcatatctttgcgggtggtcagcacatatgcagagcagcagaagaacactaacgccgttccgcccagtgccatagcgattacgtcacccattccggcagacagataggtgttcagaataggtccgaggatataacccagaaaaccggtaaaggcgaatgcggagataatcccggtcggcttattcgccgttttataggtcaggaacatcaaaccatacatacccaccagcgtcagaatcagacccggagatggcagcatcagcaccgtactggcagttgcggtaatcgcgctaaaggccagcgtcaggctcagcagaaaataggtattacgcagcaccttatgggtgctaagcagacttgtacggtcatgactagaactaacaatacgatccattgagtcactctctatgacagatgtaattaattaagcagcataatgataatgcgtaagggcacccagaagttttacccatctttacgcatttgatctggaacaggtttaacagcggattatcaggtcattaagcaaatataacgccctgagaatttcgacaggcaaaagaaaaaggggttagcatttagctaaccccttatcttatttggcggaagcgcagagattcgaactctggaaccctttcgggtcgccggttttcaagaccggtgccttcaaccgctcggccacacttccggaatgacgcgcactataaacatcccgatgcggcgtgtaaacccctaatttgtttgtttgcctgaaaaacagccaaaagtgcattgatagcgtgaaataacagcagattgatcatttcatcaccatgaattccttctcttttactcgtttagcaaccggctaaacatccccaccgcccggccaaaagaaaaataggtccatttttatcgctaaaagataaatccacacagtttgtattgttttgtgcaaaagtttcactacgctttattaacaatactttctggcgacgtgcgccagtgcagaaggatgagctttcgttttcagcatctcacgtgaagcgatggtttgccttgctacagggacgtcgcttgccgaccataagcgcccggtgtcctgccggtgtcgcaaggaggagagacgtgcgatatgaataacgaggaaacattttaccaggccatgcggcgtcagggcgttacccggcgcagctttctcaaatattgtagtctggctgccacgagcctgggattaggcgcgggaatggcaccaaagattgcctgggcgctggagaacaaaccgcgcattccggtggtatggatccacggtctggaatgcacctgctgtaccgaatcttttatccgctccgctcacccactggcgaaggacgtcatcctttccctgatttccctcgattacgacgatactttgatggctgccgccggaacccaggcggaagaagtctttgaagacatcatcacgcaatacaatggcaaatatatcctcgcagtagaaggtaatccgccgctgggcgagcaggggatgttctgtatcagcagcggtcgaccgtttattgagaaactcaaacgtgccgctgccggagccagcgcgattatcgcctggggaacctgcgcgtcctggggctgcgtgcaggccgcgcgacccaatccgacgcaggcaacgcctatcgacaaagtcatcaccgacaaacccattatcaaagtacctggctgcccgccgatcccggatgtgatgagcgccatcattacttacatggtgacctttgatcgcttgccagatgtcgacagaatgggccgtccgctgatgttctatggtcagcgaatccacgataaatgctatcgccgcgcccacttcgacgccggagagttcgtccagagttgggatgatgacgctgcccgcaaaggttactgcctgtacaaaatgggctgcaaagggcctaccacctataacgcctgttcctccacacgctggaatgatggcgtttctttcccaatccagtctggtcacggctgcctgggctgtgcggaaaatggtttctgggatcgcggtagcttctacagccgcgtggtcgatattccgcaaatgggtactcattccaccgccgataccgtcggtttaaccgcgcttggcgtggtggcagcggctgttggtgtgcacgcagtcgccagcgccgttgaccagcgcagacgtcataaccagcaacctacagaaaccgaacatcagccaggcaatgaggataaacaggcatgagcactcagtacgaaactcagggatacaccatcaataatgccggacgccgcctggtggtcgacccgattacgcgcatcgaaggccacatgcgctgcgaagtgaatattaacgatcagaatgtgatcaccaatgccgtctcctgcggcaccatgtttcgcgggctggagatcatcctacaagggcgcgacccgcgcgatgcgtgggcgttcgttgaacgtatctgcggcgtctgtactggcgtacacgccctggctagcgtttacgccatcgaagatgctatcggtattaaagtgccggacaacgccaatatcatccgcaacattatgctggcaacgctctggtgccacgatcatctggtgcacttctatcagcttgccgggatggactggatcgatgtgttagatgcgctgaaagccgacccgcggaaaacctccgaactggcgcaaagtctctcctcttggccgaaaagttcccctggctatttcttcgacgtacaaaaccgcctgaaaaaatttgttgaaggcgggcagttggggatcttccgcaatggctactgggggcacccgcagtacaaactgccgccagaagctaacctgatgggctttgcccactatctcgaagctctcgatttccagcgtgaaattgtcaaaatccacgcggtctttggcggtaaaaacccgcatccaaactggattgtcggcgggatgccttgcgccatcaacattgacgaaagcggcgcggtcggggcagtcaatatggaacgcctgaacctggtgcagagtattatcacccgcacggcggacttcattaacaacgtgatgatccccgacgccttagccatcggtcagttcaacaaaccgtggagcgaaatcggcactggtctttctgataaatgcgttctcagctacggcgcattcccggatattgccaacgactttggcgagaaaagtctgctgatgcctggcggcgcggtgattaacggcgacttcaacaatgtgctgccagtggatttggttgatccgcagcaggtgcaggagtttgtcgaccacgcctggtatcgatatcccaacgatcaggtcgggcgtcatccgttcgatggcatcaccgacccgtggtacaaccccggcgatgtcaaaggcagcgataccaacattcagcagctgaatgaacaggaacgctacagctggatcaaagcgccacgctggcgcggtaacgcgatggaagtggggccgctggcgcgcacgttaatcgcttatcacaaaggcgatgctgcgaccgttgagagcgtcgatcgcatgatgagcgcgttgaacctgccgctttccggtatccagagtacgttaggccgcattttgtgccgcgcgcacgaagcgcagtgggccgcaggtaagttgcagtatttcttcgacaagctgatgaccaacctgaaaaacggcaatctcgccactgcttccacggaaaaatgggaacctgcaacctggccgacagagtgccgtggtgtcggttttaccgaagcgccgcgcggggcgttaggccactgggccgccattcgcgatggcaagattgatctctaccagtgcgtggtgccgaccacctggaacgccagcccgcgcgatcccaaagggcagattggcgcttatgaagcggcgctgatgaacaccaaaatggcgatccccgagcaaccgctggagatcctgcgtactctgcacagctttgacccgtgcctcgcctgtagtacacacgtgctgggcgacgacggtagcgagctgatctccgtgcaggtgcgttaacagcgaaggagaatcatcatgcaacagaaaagcgacaacgttgtcagccactatgtctttgaagcgccagtgcgcatctggcactggttgacggtgttatgcatggcggtgttgatggtcaccggatactttatcggcaagccgctaccttccgtcagcggcgaggcgacgtatctgttctatatgggctacatcaggttaattcacttcagcgccgggatggtttttaccgtggttttgctgatgcggatctactgggcttttgttggcaatcgatactcccgcgagctgtttatcgtgccggtatggcgtaaaagctggtggcagggcgtgtggtatgaaatccgctggtatctgtttctggcaaaacgtccgagtgccgatataggccataatcccatcgcccaggcggcgatgttcggctatttcctgatgagcgtctttatgatcatcactggttttgcgctgtacagcgaacacagccagtacgctatttttgcgccgttccgttatgtggtggaatttttctactggacgggtggcaacagtatggacattcacagctggcatcggctggggatgtggctgattggcgcgtttgtgatcggtcatgtctacatggcgctgcgtgaagacatcatgtccgacgacacggtgatctccaccatggtcaacggctaccgtagccacaaatttggcaaaataagtaacaaggagcgtagttgagctaaataagtaacaaggagcgttcatgagcgagcaacgcgtggtggtcatggggctgggcaacctgctgtgggccgatgaaggcttcggcgtgcgggtggcggaacggctgtatgcccattaccactggcccgagtatgtggagattgtcgatggcggtactcagggactgaacttgctggggtatgtcgaaagcgccagccatctgttgattctcgatgccattgactacgggctggaacctggaacgctgcgaacctatgccggagaacgcattccggcttatctcagcgcgaagaaaatgagcctgcatcagaacagtttctccgaagtgttggcgctggcggatatccgcggacatctgccagcacatattgccctcgtcggtctgcaacccgcaatgctcgacgactacggcggtagcctgagcgaactggcacgggagcaactgcccgctgcggaacaggcggcgctggcgcagcttgctgcgtggggaattgtgccgcaaccggctaatgaaagccgctgtctcaattatgactgtctgagcatggaaaattacgaaggcgttcgcttgcgccagtaccggatgacacaggaggagcagggatgagcaacgacacgccatttgatgcgttgtggcaacgaatgctggcgcgcggctggacgccagtcagtgaatcccgtcttgacgactggcttacgcaagcgccagacggcgtggtgttattaagcagtgacccgaaacgcacgccagaggtcagcgataatccggtaatgattggcgaattactgcgcgagtttcccgactatacatggcaggtggcgattgctgaccttgagcagagcgaagccatcggcgatcgctttggcgtctttcgctttcctgccactttagtgtttaccggcggaaactatcgcggcgtgctgaatggtattcacccgtgggcggaactgataaacctgatgcgcgggcttgtcgaaccgcagcaggagcgtgccagttgatctaaccgcagcaggagcgtgcctcatgagcgaaacttttttccatctgctggggccaggaacgcaaccgaacgatgacagtttcagcatgaatccactgccgatcacctgtcaggtgaatgatgaaccgagtatggcggccctggagcaatgtgctcacagcccgcaggtgattgcgctgttaaacgagttacaacatcaactaagcgaacgccaaccgccgttgggcgaggtgctggcagtcgatctgttaaatctcaacgccgacgatcgtcactttatcaatacgcttctcggggaaggggaagtgagtgtgcgcattcagcaggctgacgacagtgaaagtgaaatacaggaggcgatcttctgcggattatggcgggtgcgcagacgtcgcggcgaaaagttgctggaggacaaactggaggctggctgcgcgccgctggcgttgtggcaggcggcaacgcaaaatctcttgccgacagatagcctgttaccgccgcccattgatggcctgatgaatggcctaccgttggcgcatgagttactggcacatgtacgtaaccccgacgcgcagccgcacagcattaatctgacgcaattacccatcagcgaggctgatcggctttttctcagtcgtctctgtgggccgggaaatattcagattcgtaccattggctatggcgagagctatatcaacgccacggggttacgccatgtctggcatttacgctgtacggacaccttaaaaggcccgttactggaaagttatgaaatctgcccaataccggaagtggtgctggcagcgccagaagatttggtcgactctgcgcagcggcttagcgaggtatgtcagtggctggcggaagctgcaccgacgtaaaaagacggtaagtatcgctttcagtcttatgaatatcgcaatcggcgaatacctctggtcgtagagtttcaggataaagagggagatctaccattatcgggttatttttctctcttcgcctacaggagtgcgcatgtgggatgtcattgatttaagccgctggcagtttgctctgaccgcgctgtatcactttttatttgtaccccttaccctggggctgatttttttgctggctattatggaaaccatttacgtggtcaccggcaaaacaatctaccgcgatatgacgcgcttctggggtaagctcttcggtatcaattttgctcttggcgtggctaccggcctgaccatggagtttcagtttggtactaactggagtttctattccaactatgtgggcgatatttttggcgcaccgctggcgatggaagcattaatggccttcttcctcgaatccacctttgtcgggctgttcttcttcggctggcaacggctgaataaataccagcacctgctggtgacgtggctggtggcgttcggtagtaatctctctgcgttgtggatattgaatgccaacggttggatgcaatacccgaccggtgcgcattttgatatcgacaccctgcgtatggagatgaccagcttcagcgagctggtctttaatccggtcagccaggtgaaatttgtgcacaccgtaatggcgggctacgtgaccggggccatgtttattatggcgatcagcgcctggtatttactgcgcggacgggagcgcaatgtcgcattacgcagctttgccatcggttccgtcttcggtactctggcgattatcggtaccctgcaactcggagacagttctgcgtatgaagtcgcgcaagtacaaccggtaaaactggcggcgatggaaggggagtggcaaacggaacctgcacctgcaccgttccatgtggttgcctggccggaacaggatcaagagcgtaacgcctttgccctcaaaattcccgcgctgctagggatcctcgccactcacagtttagataaacccgtgccgggtctgaagaatttgatggctgaaacctacccacgcttgcaacgcggacgtatggcctggctgttaatgcaggaaataagccaaggcaatcgtgagccgcatgtgttgcaggcattccggggactggaaggtgacctgggctacggcatgttgctctcccgctatgcgccggatatgaatcatgtcacagccgcacagtaccaggcggcgatgcgtggcgcgatacctcaggttgcgccggtattctggagtttccgcatcatggtgggctgtggttccctgctgctactggtgatgctgattgcgcttgtccagacgctgcgtggcaaaatcgaccagcatcgctgggtgctgaaaatggcgctctggagtttgccgttgccgtggattgcgattgaagccgggtggtttatgaccgagtttggtcgtcagccgtgggcgatacaggacatcttaccgacatactccgcgcactccgctttaaccacaggacaactggctttcagtctgatcatgatcgtagggctttacaccctgttcttaatcgccgaagtctacctgatgcagaaatatgcccgtctggggccgagcgcgatgcagagtgaacaaccgacgcagcaacaggggtaaaggagaaaatcatgtttgattatgaaacattgcgcttcatctggtggctgctgattggcgtgatcctggtggtctttatgatctccgacggatttgacatggggatcggctgtctgctgccgctggtggcgcgtaatgatgatgaacgccggatagtgataaacagcgttggtgcacactgggaaggcaaccaggtctggttgatcctcgctggtggggcattatttgccgcctggcccagagtgtatgcagcggcgttttccggcttttatgtggcgatgatcctggtgctgtgcagtctgttcttccgcccgctggcctttgattatcgcggaaaaatcgccgatgcacgctggcgtaaaatgtgggacgccggtctggtcatcggcagtctggtgccgccggtagtcttcggtatcgccttcggcaacttgttgctcggcgtgccgtttgccttcacaccgcaattacgcgtggagtatctcggcagcttctggcaactgctgacgccattccctttattgtgcggattgctcagccttgggatggtgattttgcaaggtggcgtctggttacaactgaaaactgttggtgtgattcatctgcgtagtcagctggcgaccaaacgcgctgcactgttggtgatgctgtgctttttgctggcgggttactggctgtgggtcggtattgatggctttgtactgctcgcccaggatgctaacggtccttccaatccgttaatgaaactggtggcagtgctacctggtgcctggatgaataattttgtcgagagccccgttttgtggatcttcccgctgctgggattcttctgcccattgctgacggtgatggcgatttatcgtggtcgcccgggttggggatttttgatggcaagtttgatgcaatttggcgtgattttcacggcaggcatcacgctgttcccctttgtcatgccgagtagcgtgagtccgatctccagcctgacgttgtgggacagtacttccagtcagctgacgctgagcattatgttggtaatcgtgctgatatttttgcccattgtgttgctctacactctctggagctactacaaaatgtgggggcgcatgacaacagaaactctccgccgtaacgaaaacgagttgtactaaggagcagaaacaatgtggtatttactttggttcgtcggcattttgttgatgtgttcgctctccacccttgtgttggtatggctggacccgcgtctgaaaagttaacgaacgtaggcctgatgcggcgcattagcatcgcatcaggcaatcaataatgtcagatatgaaaagcggaaacatatcgatgaaagcgatcttaatcccatttttatctcttctgattccgttaaccccgcaatctgcattcgctcagagtgagccggagctgaagctggaaagtgtggtgattgtcagtcgtcatggtgtgcgtgctccaaccaaggccacgcaactgatgcaggatgtcaccccagacgcatggccaacctggccggtaaaactgggttggctgacaccgcgcggtggtgagctaatcgcctatctcggacattaccaacgccagcgtctggtagccgacggattgctggcgaaaaagggctgcccgcagtctggtcaggtcgcgattattgctgatgtcgacgagcgtacccgtaaaacaggcgaagccttcgccgccgggctggcacctgactgtgcaataaccgtacatacccaggcagatacgtccagtcccgatccgttatttaatcctctaaaaactggcgtttgccaactggataacgcgaacgtgactgacgcgatcctcagcagggcaggagggagtattgctgactttaccgggcatcggcaaacggcgtttcgcgaactggaacgggtgcttaattttccgcaaagtaacttgtgccttaaacgtgagaaacaggacgaaagctgtagtttaacgcaggcattaccaagcgaactcaaggtgagcgccgacaatgtcagtttaaccggtgcggtaagcctcgcaagtatgctgacggagatatttctcctgcaacaagcacagggaatgccggagccggggtggggaaggatcaccgatagtcaccagtggaacaccttgctaagtttgcataacgcgcaattttatttgctacaacgcacgccagaggttgcccgcagccgcgccaccccgttattagatttgatcaagacagcgttgacgccccatccaccgcaaaaacaggcgtatggtgtgacattacccactagtgtgctgtttatcgccggacacgatactaatctggcaaatctcggcggcgcactggagctcaactggacgcttcccggtcagccggataacacgccgccaggtggtgaactggtgtttgaacgctggcgtcggctaagcgataacagccagtggattcaggttagcctggtcttccagactttacagcagatgcgtgataaaacgccgctgagtttaaatacgccgcccggagaggtgaaactgaccctggcaggatgtgaagagcgaaatgcgcagggcatgtgtagcttggcaggttttacgcaaatcgtgaatgaagcacgcataccggcgtgcagtttgtaatgcataaaaaagagcattcagttacctgaatgctctgaggctgatgacaaacgaagaactgtctaatgcgtagaccggaaaaggcgttcacgccgcatccggccactttcagtttgcaatacgtacgcttgagatcaggattgtctactttgagtataacatccttgtgaaatctccctttcctcataccgcttgcactatatactgcgggtaggaaaggcgcgcagagggaaatataagattgttaactatccccctctggaaatacgacttgtgagcataagataaatcttagcaaaatacaaattaaagataaggaaattgttacgaaagctattaattattgttggtaatatagtttcaagtggtactataactggctgttaaatggcatttataactattaggtgcagagatattcgcttaaatggattagtttctttgtggaaaagtaactgatgttataatgtatgatgttgactatttcactattccaataaaaccagtcagctttaaacaagcagcgtcatattaagagagataaacatttgccgctgttggtcctcgcaggccatttacgcggcaaaattccacacgtaatcctggtataagcacttctgcgtcgcggggagtgaatgcggaaatatggacctgaacttctttacgaccgtcggaggggataatgaatcctttgccgcttttgcgatcaaaggttttgacaattcctgtcattttacgggacaaacaaattccttactgaaaatactgcgctgcactatacggggttaataaaataaagccagcgatatttaagaccgccggacggctaaaataaaatttgcttaatctcaattatcatgcgttaatagctgcgtcggtttgaaagacagacagcatacaaagtagtttactaaagcagttctcattatcaggcattatccccttcttttgagtctctctcctgaacactaagtagtttctgtattaaagccctgtttgccgaaaggcccaaaatgaaggaagtaaaatatgtctaataaaatgactggtttagtaaaatggtttaacgcagataaaggttttggctttatcactcctgatgatggcagcaaagacgttttcgtccatttcaccgccatccagagcaatgaattccgcacgctgaacgaaaatcagaaagttgaattttctattgagcaggggcaacgtggccccgcggcagcgaacgttgttacgctctaaggttgccattattactcaacatctccatttccgctgtccatgttgtcatggttcacagtaccgcacatcggcattcgatgtgacggagcgaaaccctttgggcgctaagtgtattttttgtaaatcgacgatgatcacctttgataacgtcgcgctgcaaatacgcactgaccatgcgccgctggattagtcaaaataatatcaggctccctcgtggagccttttttatatctgccttatttttcttcaacgctgtatgtatagtaagcgataacctgttgattattgaatctttcggggagatggcttataacatttcttacctgaccagggtaccgggaaccaacaccttactggcgtgttgctgtcttttaagaccagaagaggttaacagtgaatattgaagagttaaaaaaacaagccgaaacggaaatcgccgactttatcgcgcaaaaaatcgccgagctgaacaagaatacagggaaagaagtctctgaaattcgcttcaccgcacgagaaaaaatgaccgggcttgaaagttatgatgtcaaaatcaaaataatgtgattttgtgaacatcaccccgtgcgaggtgatgttccgcttgttgctaatttagtgaccaatcattggcgcttgtggaattaagcgtcggtacaattcctccggcaccgggctttgccatactcccgcatacattgcgtaaccaatcaccgcaaacataatccccagaaccagtagcgtcattaaccagccagacaacgcaaaggcttttttatttgccgcaggtttttgcagactaaaggtcaatgtactggctaccggacaactctctacgcaagtcatacagccggtacattccactgttcgtacctgaattaatttatcgaccgggatccgacttgggcaattttttgcgcatttgccacagtcgatacaactttcggcattgcgacgaatcttaaacgggctcaataggctaaccacgcccatcagcgcgccatatgggcaaagataacgacaccaggcatggcgaataaacaggctggcaatcagcaaaacggtcacgctgattaatgtcgcggtccccatatgacgaaagaaatcgagcattttaacgtccatcaccacgctgtaggggctcaacataaaatagtgaatcgcctgagcgggcatcaataacgcgatatagataaaaaaactcaacagcaaatacttcacgccgcgcagaggaatatccagccagcggggaaggacacattgccgaccaaacagtttgttaccgagatcgccgattaattcagaaagcgtaccaaccgggcataaccaactgcaaaaggcctttttgagtaatagactgatgacgataaaagcgaccaataacagcatcgcggcggcgtggacggacggtaactgacctgttacaaggctatatttcagattcatcagcccggcaatcggtagccagccttcgatacctcccggtctggcgacaaatgtcgtgctacttgccgtttcgtaatagcgcacccaataccagaacgtgatggcaatataaatattcattgccaacagtaataattgcgtcgctttacgccaggtcgtggcattacgccagtcattccacggtaatttgccgcccgtcgtgcctggccgccgctgccagcgggttcttttattctctgccatgattttgccagtccgttaagttgtataccaaatgccactattctagttgttcttaactggctgatattgattcaaatcgcgttcaggtctttcttatgcaaccatgcttccagagcggcaacactgcgtgtaatttcttcgtgtggaaggggggcagataatggctgctgctccagttgtgcgcatagctggctggcgatatgcattcccagactgctgcaactgctttttagctgatgcgcggcacgctttattttctcgctatcctgactggcgcgggcaatgtcgatttcatcgagaagcggcagggcatgttgtgtaaataataccagccattcgtggatcttctccgtccccattaactgagcatcttcattgagttggcttacatccaggctttgatcattattgacttgcagttggagatagtgcgccagtaactgaccgagcacttcacgcggcaccggtttagggataatcccgcggaataaactactggtacgctggcgcagcgtttcgtcaatgacatgggcgctaaagccaatcaaaaccaggctcggatattgctgtgccagttgtcgggcaagcgtaatgccgtcgatatccggcagatcaaaatccaccagtgcggcagcaaacggttcgctattttgcagtgtctctaaagcctgcgcggcattgccaacagcaacaatctgcgcaccactggttttcagcatctcaatggtaattcgctgggttagcgggttatcttcaattaacagcaaacgtaaaccgtcaagacgcaccgcctgattgactgtttttggcacgggtgccgtggcaacacgtaacggcaagcgtaaacaaaaacagcttccaacctccggcgtgctggtggcgctcagttcgccgcccatcgcctgggccagacggctactgatagtcagtcccagcccggtgccgccgcgtttgccgcttacctgcacaaatggctggaagatttctgccagtttcgcgggatcaataccgcagccgctgtcttccacttcgaccagccattgctcgccatcagtgcgactacgcaggataatgtacccttcgtcagtaaaacgcagggcgttgctcaacaggttggttataacctgacgaatacgtcgtggatcgcccattaacgcgcacggcatatcatcggcaattgccgttgccaggcgaatcgggcgacctttcacccgtccgctcattaattgcagggtactttccagcagcgggcgcggttcaaagggctcatcgctgacgctaacattcttgccacctgcttcgatagcggaataatcgagaatatcgttgaggatggtcagcaagctttcaccagagtcagtaattgcccgcaaatcatcacgctgggcgttaagtgcggggttatctgccagcagttgagcagtgccgagaataccgtacagcggtgtgcggatctcatggctcatcgccgccagaaacgcgctttttgcctggctggctttttctgcttccgcccgtgcctgtcggtgttctatcaccagttcctgcaattcagctgtacgcgctttgacctgcgccgccagctgttcgcggtggcgattcagtgcatgaacattgctgcgaaacgcatccatcagccgcccgatggtatccagctcccgtacgccagcggtttccgggaaaggggagtcaatatcaccgtccagcagccgttgcagcgcctgcgtttgttcggcaagtggacgcgtgacactgcgataaaccacgcgccagaggatcagaatcagtgcgcaaagactaaccatccccagcaataacaggctgtattgcccgcgtgcactcgctttttccagatgcgccagtccgtgctgattacgcagctcaatggtgtcgaccagctgactgacttcgctactaaactgcgcgaactgggcgatgttattttgtgcgagagtttgtaggtgattgctgatttcactgtcctgctgatacagcgccagcaaatcgctatattggctaacggtagttaacgttgttgcgacctgcgcacgaacacccggatcttcaatgcgtatttgccgacgttgcagaattttcaccgcattattgagctgcttttccagcgttggtgcatttttctggatctgctccagccccagattcatcaccatttgctgcacccgcagagcgctaaggcgcagttcattcatctggttaacatactcaagatcgatatcaatcagccgatcgagtgcactttcagcagcctgacgctgatcttgttcgatcaaatcgtaaatcccggcctgggtcgctccagcggaagttgtcgcattattcgcctgaccttgcgccaggcgtgcgatctcatcggcggcagcgactatctgctgactgagttgctgttgttgctggcgcagttgcaaacgctgccccaccagttccccttgctgacgtaagctacgggagatctcctgctcctgttgttcaatagcggtggtatcaaaaccttgttcccgtaacgcttgcagcaacgcattaatcttcaggctttgtgcggtgagcattcgcccctgcgcctgccacatcttttcgttatcggcactggtcaggttctgcgcggcgaaaagttcccaggcgctggcttcgctcaactggcgcgccatattcatggtaggaatcaatgcctgagtgttgtctttttccacctggctgataaagcgcaggttgtaccatcccaccagggtactggtcagggttaacagcgccatcagggcaaagcccatccagagtcttcgggtcagggttaaattcacggtcggtgcactttaggtgaaaaaggttgagtcgcaaagcggaatgcatctagcataaagccttattattgatgaggctatcatgcgcgtactgctatttttacttctttcccttttcatgttgccggcatttagcgctgataacctgttgcgctggcatgatgcgcagcatttcacggtgcaagcctctacgccgcttaaagccaaacgcgcatggaaactgtgcgcgctttatcccagcctgaaagatagttattggttaagcttgaactatggtatgcaggaggctgctcgccgctacggtgtggatttaaaagtgctggaggcaggcggctacagccagttggctacccagcaagcacaaatcgaccagtgtaaacagtggggcgcagaggccattttgctcggtagtagcacgaccagttttcccgacctgcaaaagcaggtagcaagtctgccggtgatcgaactggtaaatgctattgatgctccccaggtgaaaagccgcgttggtgtgccctggtttcagatgggctatcaaccggggcgatatctggtgcaatgggcgcacggtaaaccactgaatgtgctgttgatgcccggacccgataacgccgggggcagtaaggagatggtcgagggttttcgcgcagccattgccggaagcccggtgcgtattgttgatattgcgcttggtgataacgatattgaaatccagcgtaacctgttgcaggagatgctggaacgccatccagaaatcgacgtcgttgccggaacggccattgcggcagaggcggcaatgggggaagggcgtaacctgaaaacgccgcttaccgtggtgagcttttatcttagtcatcaggtgtatcgcgggctgaagcggggaagagtgattatggctgccagcgatcaaatggtctggcagggggaactggcggttgagcaggccatcaggcaattacaggggcaaagcgtttctgataatgtcagcccaccgattttagttctgacgccgaaaaatgccgaccgtgaacatattcgccgcagcctgagtccagggggatttcgtccggtctatttttatcagcacacaagtgcggctaagaaataatcagcacacatcagcggctaagaaataaccttcaccatgttgcgtcaccagtaaatccgcgctgagtttatgacgtaaacgacgaattaacacatcgacggtgcgcaggtcagggttttccacccgacgcgcagaaagcatacgtagcagacgttcacggctgagaatttcgcccggattcgtcacaaatgccaccaacatttcatactctgcgcgggtcagtttaatcggctcgccatcccgctccagcgtatggcggctcacattcaggcaataaccggcaaagcgatagcagttgtcctgagtgtgcggttgagcttgtcgcgcgaggtcgattcgccagagcagatttttcacccgtactaccagttcgcgcagttccagcggtttggtgacgtaatcgtctgcgcccatttccagcccaacaatacggtcaatccgatcgctgcgtccggtaaccagaataatccccaccgtactgcgttctcgcagggcgcgggttaacatcaggccattttcatcgggtaagttgatatccagcagaattaaatctacgctctgattctgcataatttcccgtagcccagcaccgctcgccgtaacggaaacggtatacccctcctgagtgaagtaggattgtaatcgcgcctgggtaaccggctcatcttcaacaataacaatgtgatgtggcatcagagggttttactcattctgttcatatctgttcatattctgccgtaagccgttcatcctgaccagtgccgctgttcatatttgctcattaagatcgcttcactaaaccataattctacaggggttattatgcggaaactctggaacgcgctacgccgacccagtgctcgttggagcgtactggcgctggtcgcaattgggattgtgattggcattgcgctgattgtattgccacacgttgggatcaaagtcaccagcacaaccgaattttgtgtcagttgccacagtatgcaaccggtgtatgaagaatataaacagagcgtgcatttccagaacgcctccggcgtgcgagctgaatgccatgactgtcatatcccgccggatattccaggcatggtgaagcgcaaactggaagcgagcaatgatatctaccagacctttattgctcactccattgatacacctgaaaaattcgaagccaaacgcgcggaacttgccgagcgtgaatgggcgcgaatgaaagaaaacaacagcgcaacctgccgctcctgccataactacgatgcgatggatcatgcgaagcagcatcctgaagcagcacgtcagatgaaggtggcagcgaaagataatcaatcctgcatcgactgtcataaaggtattgcccaccagttaccggatatgagtagcggcttccgtaagcagttcgatgagctgcgcgccagtgctaatgacagtggtgacacgctgtactctattgatattaagccaatttatgcggcgaaaggcgataaagaagcctctggttctctgctgcctgctagcgaagtgaaagtccttaaacgtgacggcgactggctgcaaattgaaattaccggctggacggaaagcgccggacgtcagcgtgtactcacccaattcccaggtaaacgcatctttgttgccagcattcgtggtgatgtgcagcagcaggtaaaaacgctggagaaaaccaccgttgccgacaccaataccgagtggagcaagttgcaggccactgcgtggatgaagaaaggcgacatggtgaacgatatcaaaccgatctgggcttatgcggatagcttgtacaacggcacctgtaaccagtgccacggcgcaccggaaatcgcccactttgacgctaacggttggatcggcacgctcaacggcatgattggctttaccagtctcgataaacgtgaagaacgcaccttgttgaaatatctgcaaatgaatgcgtctgacaccgcaggtaaggctcacggcgataagaaggaagaaaaataatgaacaataacgatctctttcaggcaagtcgtcggcgttttctggcacaactcggcggcttaaccgtcgccgggatgctggggccgagtttgttaacgccgcgacgtgcgactgcggcgcaagcggcgactgacgctgtcatcagcaaagagggcattcttaccgggagccactggggggctatccgcgcgacggtgaaggatggtcgctttgtggcggcaaaaccgttcgaactggataaatatccgagcaaaatgattgccggattgccggatcacgtacacaacgcggcgcgtattcgttatccgatggtacgcgtggactggctgcgtaagcgccatctcagcgatacctcccagcgcggtgataaccgttttgtgcgcgtgagctgggatgaagccctcgacatgttctatgaagaactggaacgcgtgcagaaaactcacgggccgagtgccttgctgaccgccagtggttggcaaagcacggggatgttccataacgctagcgggatgctggcgaaagctattgccttgcatggtaatagcgttggtacgggcggagattactctaccggtgctgcgcaggtgatcctgccgcgcgtagtcggtagcatggaagtgtatgaacagcaaacctcctggccgctggtattgcagaacagcaaaaccattgtgctgtggggctccgatttgctgaaaaaccagcaagcgaactggtggtgcccggatcacgatgtttatgaatattacgcgcagctaaaagcgaaagtcgccgccggtgaaattgaggtcatcagcatcgatccggttgtcacatccacccatgagtatctggggcgcgagcatgtgaagcacattgcggttaacccgcaaactgacgtgccgctgcaactggcgctggcacatacgctgtacagtgaaaacctgtacgacaaaaacttccttgctaactactgtgtgggttttgagcagttcctgccgtatctgctgggtgagaaagacggtcagccgaaagatgccgcatgggctgaaaaactgaccggcattgatgccgaaaccattcgtgggctggcgcggcagatggcggcgaacagaacgcaaattattgctggctggtgcgtgcagcgtatgcagcacggtgaacagtgggcgtggatgattgtggttctggcggcgatgctggggcaaattggcctgccaggtggtggttttggttttggctggcactacaacggcgcaggcacgccggggcgtaaaggcgttattctgagtggtttctccggctctacgagcattccgcctgttcacgacaacagtgactacaaaggctacagcagcactattccgattgcccgttttatcgatgcgatcctcgaaccggggaaagtgatcaactggaacggtaaaagcgtaaaactgccgccgctgaaaatgtgtatttttgccggaactaacccattccatcgccatcagcagatcaaccgcattattgaaggcttgcgcaagctggaaacggttatcgccatagataaccagtggaccagtacctgccgctttgccgatatcgtactgcctgcgaccacgcagtttgagcgtaacgatctcgaccagtacggcaatcactccaaccgtggcattatcgccatgaaacaggtggtgccgccgcagttcgaggcgcgcaacgacttcgatattttccgcgagctgtgccgtcgctttaatcgcgaagaagcctttaccgaagggctggacgaaatgggctggctgaaacgcatctggcaggaaggtgtacagcaaggcaaaggacgcggcgttcatctgccagcgtttgatgacttctggaataacaaagagtacgtcgagtttgaccatccgcagatgtttgttcgccaccaggcattccgcgaagatccggatctcgaaccgctgggcacgccgagtggcctgattgagatctacagcaaaactatcgccgatatgaactacgacgattgtcaggggcatccgatgtggtttgagaaaatcgaacgctcccacggtgggcctggcagccaaaagtatccgttgcatctgcaatctgtgcatccggatttccgacttcacagccagttatgtgagagcgaaacgctgcgtcagcaatatacggtagcgggtaaagagccagtattcattaacccgcaggatgccagcgcgcgcggtattcgtaacggtgatgtggtacgcgtctttaacgctcgcggtcaggtgttggcaggggcagtggtttctgaccgctatgcacccggcgtggcacgaattcacgaaggggcatggtacgatccagataaaggcggcgagcctggtgcgctgtgcaaatacggtaaccccaacgtgttgaccatcgacatcggtacaagccagctggcgcaggcgaccagtgcgcacactacgctggtggaaattgagaagtacaacggaacagtggagcaggtgacggcgtttaacggccccgtggagatggtggcgcagtgcgaatatgttcccgcgagccaggtgaaaagttgaattaacccgcgtcgcaggtgaaatcatgaccacgctgacagcacaacagattgcctgtgtttacgcctggctagcgcagttgttctcccgtgagctggacgatgaacaactgacgcaaatcgccagtgcgcagatggctgaatggtttagcttgctgaaaagcgaaccgccgctcactgcggcggtgaacgagctggaaaaccgtattgccacgctgacagtacgtgacgatgcccgtctggaactggccgcggacttttgcggcctgtttctgatgaccgacaaacaagcggcgctgccgtatgcaagcgcctacaaacaggacgagcaagagattaaacgcttgttagttgaggcagggatggaaaccagcggcaatttcaacgaaccggcagatcatctggcgatctatctcgaattgctcagccatctgcattttagcctgggagaggggaccgttcctgcgcgaagaatcgacagtttgcggcaaaaaacactgacggcgctgtggcaatggttaccagagtttgttgcgcgttgtcgtcagtatgacagctttggtttttacgcggcactaagccagttattgctggtgttagtggagtgcgaccaccaaaacagataacgtcgtttgtgcgcctgaaaagacgcgtttagcgtcgcatcaggcattatggcgcagttgccggatgcggcgtgaacgtcttatccggcccacaggaactgtaatctttgtagaccggttaagatgcgtcatcgcatccggcaaacacacatcacggatgagctacaaaccgggaaagccgctggcgcagcaggcggttttcctgcttcaggtgcgcaatatcatccattaacgtcagcgccaccgcgatccccggccagtccagagccagttcatgacgcaggcgtaccgcgcgttgcaccacaatggcggcatggtcgtcaaatacccaggttgtttcctggatctcacgcggttcaaccacccccaaaccgacaatttcattcaactcctcttcagagatgccggtatgcaggcaaaattcggtaatagtaaaagtcaccgtaacattagccattatgctttcccccaatctttacgtggatcaaaagagctctgggcgtctgccagttgctgccacagcgcggcagtgttttcatccggtttcggcggcatcacgattttcagtaccgcatacagatcgccggtctgttttttgctcaccagacctttgcctttaacgcgcaatcgttgcccggcctggctgcctggcgggatagtcagcaaaatgctttctttcagtgttggaacggtgactttagcacccagcgccgcttcccacgggctaaccggcaccacaatttccagatcctggccgacaatatcaaacagcggatgtggcgcaatatgaatcaccagccacaaatcgccatttggaccgccgttttcgcccggcgtcccctggcctttcagacggatgcgttgaccattgccgacgcccgccgggatcttcacattcagcgttttcggaatttcctgttcgatcatgccaaaggcgttataaaccggcaggttatagctgatggtacgcttatgctcagtaagcgtttcttcgaggaataccgccacttcgatttcaatatcgtggccgcgtgtggcggggcgttgacggctctggcgggcatgctgaccgaaaatactgctgaagatatcgtcaaaatcttcggcgttaaaactctgaccgtcgccatggtggaactgacggttaaattgcggatcgttgcgatgttgccacatctgatcatactcagcgcgacgttgttcatcacttaacacttcccaggcttcagcgacctctttgaagcgggcttcggcatccggttctttgctgacatcaggatggtatttgcgggcaagtcgacgataggcggtcttgattgtcttgagatcgtccgtcggtttcacgcccatgatggcgtaataatcctttaattccatagcgttatctcgcgtaaatcaacacaaattgaaggaacccctgtaaggtaactcctataagtgtagggtaatcctcaaaatttcatatgccaacacagaatatgttattgaaatcatcgcggagaggaggtcgccatcaagatgggttgctgaacatattttaaacaggtgaaaaagggtgagcgatttttgatagttgaaccaggcactttaagtttaactagggcgtcattatttattaaattttatagacgctatatatgggtagtaatatacatggaattagttgcactgcaaataattatttgaaacaggcctggaacgatataaaaaatgagtacgaaaaaaatcaaacatatagtatcacgctttttgaaaacacactggtgtgttttatgcggttatacaatgaactcagacgtaaagtaaatgaagaggatactccatgtctggaatgtgaaagtctagaaaaagaatttgaggaaatgcagaatgataatgatctaagtttatttatgagaatattgcgtactaatgatacacaaatttatagtggggttagtggaggtattacatatactatacaatatgttcgagatattgatattgttagagtgtccttgccgggcagagctagtgagtctatcacagattttaaaggttattattggtataactttatggagtatattgaaaacattaatgcgtgtgatgatgttttttctgagtattgttttgatgatgaaaatataagtgtccagccagagcggataaatacgccgggaatatctgatttggattctgacattgatttgtctggtatatcttttattcagcgtgaaactaaccaggcattaggattaaaatatgctcctgtagatggcgatggatattgtctgttaagagctatactggttttaaaacaacatgattatagttgggcgctggtcagttataagatgcaaaaggaagtttacaacgaattcattaaaatggttgataaaaaaacgatcgaggctcttgttgatacggcattctataatctcagggaagatgtaaagacgttatttggcgttgatctacaatctgacaaccaaattcaggggcagagtagtcttatgagttggagctttctgttttttaaaaaacaattcattgatagttgcttgaataacgaaaaatgtatcctgcatttacccgagtttatatttaatgataacaagaacttgcttgctttagataccgacacgagcgataggattaaagcggtgaagaattttcttgttgttcttagtgatagcatttgcagtttatttattgttaatagtaatgtggcaagtatctccttggggaatgaatcctttagtacagatgaagatcttgagtatggttatttaatgaacactggcaatcattatgacgtttacctccctcctgaactttttgctcaggcttacaagttaaacaataaggaaatgaatgcgcaactcgactatttaaatcgttatgcaatttaatggcaaaggcatatgctaaaaaccattgttattagtctcacacttttttattggtaaatattgtctctgtattggtaacgccgcagatattctgtttagccacaggtgcaattatcagcggcgtacgcgaggcaggggctaatcaggcatagtttgcgtcaaaccttgcctgtttttgaagatgtatatagaaaaacaggcgttcaacaagccattttgcgaacctgttcccggaaaaaagtcatatttctgtcacactctttagtgattgataacaaaagaggtgccaggaatgaacaaaacgctaatcgccgcagctgtggcagggatagttttactcgctagtaacgctcaggcacaaaccgtaccggaaggctatcagctacagcaagtgctcatgatgagccgccataacttacgtgcgccgctggcgaacaatggcagtgtgctggagcagagcacgccgaataaatggccagaatgggacgtccccggtgggcaactcaccaccaaaggtggcgtgctcgaagtgtatatgggccattacatgcgtgaatggctggcagagcaggggatggtgaaaagcggggaatgcccgccgccgtacaccgtttatgcctatgccaatagtctgcaacgtaccgttgcgaccgcacagttctttattaccggcgcattcccggggtgtgatattcctgtgcatcaccaggaaaaaatgggcactatggacccaacctttaacccggtgatcaccgatgattccgccgcattcagtgaacaggcggtggcggcaatggagaaagagctcagcaaactccagcttaccgacagctaccagctactggaaaaaatcgttaactataaagattcccctgcctgtaaagagaaacaacagtgtagcctggtggatggcaaaaatacctttagcgccaagtatcaacaagaaccaggtgtttccgggccgctgaaagtcggcaacagcctggtagatgcgtttactttgcaatattacgaaggttttccgatggatcaggtggcctggggagaaatcaaatctgaccagcagtggaaggtgttgagcaagcttaaaaacggctaccaggacagcctgtttaccagtccggaagtggcgcgcaatgttgcgaaaccgctggtcagttatatcgacaaagctctggtcaccgatcgcaccagcgcaccgaaaattacagtgttggttgggcacgactccaacattgcctctctgttaacggcgctggatttcaaaccgtatcagttgcatgaccagaacgaacgcacgccgattggcggcaaaatcgttttccagcgttggcatgacagcaaagccaatcgcgatttgatgaaaattgaatatgtgtatcagagtgcggaacagttacgtaatgccgatgcgttaaccctgcaggcacctgcgcagcgtgtgacgctggaattaagcggttgcccgatagacgctgatggtttctgcccgatggataagtttgatagcgtgttgaatgaagcggtgaaataacagaaaactcccccgcgagaagcgggggagtcgctggttaaacgtttttacgttcgatggtctgttcgccccaaaaaaggctatctttatcggtcttagcaaaggctttgactaacacttcatcactaccttcttcccaaatcttttccgccattttttcgtcgtacccggcgacttcgaaaatggcctcggctatttccgggctcgtattgcgcagagatgcccattcaccgacgtgatgagctttcgcttcttgagttggcatgcgtatcctcctgttgaagattagccgttaagtttaactgccagacctgcgacatattccccttgataacgagcaatagacagttcttcctggctgggctggcgactaccgtcaccgcctgcgatggtggttgcgccgtacggcgtaccgccgcgaacctgactaacgtcaaataattcctgcgctgcgtagccaatagggacaattaccatgccgtgatgcgcaagggtcgtccaggtggatgtgatggtttgttcctgaccgccgccagtaccggtggaactaaagacgctcgccagttttccgtatagtgcgccggaagcccacaggccgcccgtctggtcgaggaaggtacgcatttgaccggacatgttgccaaagcgggtaggtgtaccaaaaataatggcgtcgtaatcggccagttcttgcggggttgcaaccggtgcagtttgcgttttaccgcctgctttttcaaataattgcggcggcatggtttccggtacacgcttaacgacaacttcagcgccatccactttgcttgcaccctcagcgactgcgcgtgccatcgtttcaatatgtccgtacatggaataataaagcaccagaactttagccatttctaaccactcctcgtgttatctctattccgtagcgattcgctaccacttatttaaagataagacgtccttttcagagtgcaaatttcacaaccacttatttgatttataacaactttcacaagcacgtaattttgtcgcaaaatgacacatttttatctcatcgcgtttttttaatcataagagcggcttatggataattattggagatgatatctattctcgctaagaagctgttgcaggatattaccaaacgcgggtctgcccgcgtcagttcactaagcttagtcccacgtagcgaaaatatggcagccgccatacgccgcgttaattctatgcaatatgatgtctatacccagacggaggtcagtaatggcaaaccatcgaggcggttccggcaattttgcagaagaccgcgaaagagcaagtgaagcaggtaaaaaaggtggacagcacagcgggggtaatttcaagaatgacccgcagcgcgcatctgaagcaggtaaaaaaggtggtaagagcagtcacggcaaaagcgacaactaaccgggctaatcaatgacgaatgcatttttgtctgtagctcgtcaaaaagccatcaccgccggttacccggtggttgatactgatgacaaatgtaagcttgcctgatgcgcgatgcttatcaggcctaccagaagattgcaatatattgaatttgcactgttttgtaggccggataaggcgtttacgccgcatccggcatgaacaatgcgtacgttgtcaacaatctgcaccgccggtaaccccggcggttttctgtttatggctcctgatgaacaacttctggcggtggaacgtcaaccaactttctgcttaacaacgcattgagtaaaatcgcgccaaaggttgctgtaccaatccctcccaacgtaaaaccgcccagcgtgagagcaaaatcacccgcgcccagcactaaggttactgcgaccataatcaaattaccgttctggcttaaatcgacacggttttgtacccatatccttgcgcctgcgacggcaatcagcccgaacacaacaatacttgcaccaccaataaccgcggccggaatggtatgaatcagcgcaccaaatttcggactaaagcccaacagcatggcgatgacggcagcagcaacaaacaccagcgtgctgtagactttggtcacggccatcacaccgatattttcagcataggtggtcacgccgctaccgccgacagagccggaaagcatcgttgccagaccatcgcctacgaatgcccgccccatatacgggtccatattgcgtccggtcatcccggcgactgccttgagatgacctaagttttccgccaccagaatcaccgccacgggcgcaatcagcatcattgcctgaccattaaaagcaggagtggaaaaatgtggcagaccgaaccaggcagcatggctgacgagagtaaaatcgacggcttttcccagccctaaaacgttggtcatcacgccatacagcagacaggcgacaattaatcctacgagaatcaataaccgctggatcatgccacgggtaaacaccgccaccagcccaatacacagcaccgtcattaccgccatccagctatcaaaggcgctagcgcttacacttttcactgcgataggcgctaagttcaggccaatcgccatcaccaccgcacccgtcaccaccggcggcatcagtcgttcaatccagcgcgtaccgattttcatcaccaccaggccaatgacggtataaaccagcccacaggcgataatcccgcccagcgcaatgctgatattcgggttaatgccctgaccgttaaagcccgtcgcggcgatcaccacgccgacaaaagccgcgctggagccgagataactggggacgcgcccgccggtaataaagaaaaacagtaacgtgccgatcccgctcattaaaatggaaagattgggatccagccccatcagaatcggcattaacaccgtcgcgccaaacatcgccaccgcgtgttgaacgcccattactgccgtctgagcaaacggcaatcgttcatccggcgcgaccacgccgctctctgtagaggtgctttttaactgccagtgaggaaaaccgaacattgccatcagctgtctccttaaggaggttaacaagcagggcgcatcagcgcgtgataactgcgatcgaaccacaccagcccgtagggtgtggtgtgacgatgaatcgcttcgatggcgcaaaacagaatgtcgtgggtgccgacgctcaccacctggctgatacggcagtcaaagctaaccagagcctcttccagttgcgggcatccggtcacccccgtctgccagcgggcggcggcaaagcggtgttccatgggcgttttgccgccaaaaaggttactaagcggctcctgcccggcgctaagtgtatttacacacagcgttcgattttcattgaatgccggccagacggacgccccacgattcaggcacaccagtaatgtgggcggcgtatcggtcacactgcagacggcgctggcggtgaacccggcgcgcccggctggaccgtccgtggtgataatattgaccgccgcgcccatgcaggacatcgcatcgcgaaaagtttgttgatcgacaatgttcatagtttgctccttacaacagcccgcaggcttcttcaaaggacagacgtggcaggcgcgcataaagcttgctgctatcgccatagccgatattaatcagcagattgctcttcagcgtgctgcccgtaaaaaaggcgtcgtccacgtgttgacggtcaaagccgctcatcgggccggtatccagtcccagcgcccggcaggcgacgatcagataggccgcctgcatggaactgttgcgaaacgctgtttcttcggcaagttgtgggctggaggtaaaccaactgcgggcatcaccgtggggaaacagtagtggtaaccgttcataaaattcactgtcccaggcgacgatagcggtgacgggcgcggtcagggttttttgcagattgccgctggaaagtgccgggcgcagacgttcttttccttctgccgtgcgggtaaacacgatccgtgccggagaacagttagcacttgtcggcccccatttcatcagggcataaatctcccgtaacgtctcatcgctgacgggtgtctcccgccagccgttgtgagtgcgggcatcggtgaacagggtgctaagcgcacctgggctaacggcttcgttcatagcaattccttacagggcggcttcacggtgatgtaacaggctggcaagcccgttgagtaacagagcattaaacgtttcgggatcggtcacgttgcaggcgtgtccgccatagggcatcaccattttctggctatcgggcagggcggcatgaagttcactggaacatgctgttggcaccagcagatcatcactggcgcagatgatttgcaccgggcagcggatgcgatccgcatggtgactaaagtcagcgcgtttgagggcgttaagtcgacgcagtaaattatttttgccctgaaaatgcgccagtgccagcgcgtcttctgcctccaggcgaggtgcgcgggccgccatccagtcggcgggatagaggaacaacggctgcgcttccacccatgcctgcgcgccgccgctatacagtaatcgttcgcgaacctgaaaacagcggcgcgtatgggcgtttattcgtagccagccgttaacgctgatcagcacagttacgctcgcgggataatccagcgccagctgcattcccaccagcgcaccgagcgcatggccgaccactgcgtaatgctcaatccctgcggctaccagcgcctgatgcagttccgctgccatctgggcgatactgtaatcttctgccagcgtgtcgggattattgccggtgccgcgctggtcgtaacagactacctgatactcctgctccagcaccgccagttgcggtaaccagtaactgccgctacccccaagaccgctaatcaacaccactacgggcgcatcagcataagggggaggactgagactaagtttcatcgcggcctcacttggcgatatgcgcaattgtggcgatttccaccagcgcgtcaggttttaccagtccgcactgaatgcagaatcgcgccggtttatcacccggaaaaaactcggcgtagatttcgttaatcgcggcgtaatttttccagtcggtaataaagatgctgttgaaggtcacatccgccatcgtgccacccgccgtctcgatcaccttgcggatagtttccagaacgtggcgggtttgcgcctttgggtcatcggcaaacagcacgttattatgttgatcaaaagccagcgtaccggagacatacaccacgccatcagccagcgtgccgggaacgaagggggccagcggtgcgctgctgccagcgggaataattacggattttggcatcgttaaactccttaagcgatatgagcaaaggacgtgggagaaagcgcgtcgcagaatgtttcgacgtcgctgacccagccaaaaaaggtttcgatattgaacaacgcggctttctgcgcaaatttcggccccgcctggtgagttgcgtcttcaagcaccacgccgaaatactccagaaaaaagccgtcgcgtagcgtgctttcgacgcagacgttggtagcgatgccggtgaaaaccagatggcgtattccgcggctgcgcaaaatgctgtccagcggcgtattgaagaaaccgctgtagcgcggcttcggcagcacaatatcgccaggctgcggcaccagttcatccaccagttgataatcccaggagcctttcgccagcaatttcccctgcagctgcggctgcttacgcatggttttcagggcgttgcttttatgaaaattcggactgccgggtccgccagcctcgacatactgttcatcccagccattttgaaaccagatgatcagcatccctgccgctcgcgctgcggtcacggcggtttgaatgttggcaatgaccgggcgagtggtactgacatcaaacccggcgagatctaagtagccgcctggcgtggcataagcgttttgcatatccaccacgatcagcgcactttgctgcggatcgaaggtaatggcttccggtcgagcggttaaggtcgtcatcatgccacctcctgagtcagcgcaggtagatgggcgcggcattgcatcagtggttgaatgcgctcgccgaaggtttcgattccgctcagaaaatcgtcgaaggttaacagcacgccttcggcaccaggcacgcttgcgacttcatctaacatgcgcgcgacactggcgtaagaaccgactaacgtccccatattgatgtttaccgcgctagtgggatcggccatctgacgaacgttggtgtcagtaccggagcgggtatctttctgactttgttcggttagccagcttaacgcctcttcatccgcgcccgctttgtagtgttcccatttggcgcgagcggcatcgtcggtttcatcggcaatcaccataaacaacacataagagccaacgtcgcgtccggtttgctctgcggcctgtttcatccgcgcagcggtcggggcgaaagccgtgggtgtatttacgcctttgccgaaacagaagttgaaatcggcataccgggcggagaacgccatgccagcgtcgctttgcccggcgcagatcactttcatggggacactcggttgcggactcacgcgacaatcattcatggtgaaaaaatcgcctttaaaatcgcttttccccgtgccccacaggtcgcgcagcacctgaacatattcggtgagatagtcgtaacgacgggagaaatagtcatcgccaggccagatacccatctgctcatactcgggcttttgccagccagtcacgaggttgacgccaaaacgcccgccagagatggagtcgatggttgcggccatacgggcgacgattgccggaggtaacgttaaggtggcagcagtggcgtaaatctgaatgcggctggtcacggccgccagccccgccatcaaggtgaagctctcaaggttgtgatcccagaactcagttttgccgccaaagccacgcagtttgatcatgctcagggcgaaatcgaaatggtagtgctccgctttttgcacaatggctttattcagttcaaaggtcggcatgtactgcggcgcgtgggtgctaatgagccagccgttgttgccaataggtacgaatacgccaattttcatcatcaacctctcttcgtctcgtaaagtgaaagtcagacggggcgctgcatcctgcatatccttttcagccgcgtattggcttgtttgcaaagcggatgccagtttttaaaaagttaatgttattaatctgttaacattacgttatctaaaatatctggtaaaaagtggactaaacggtcaaaacagttgcacataaaacatgcatctgtgcgcgatgagagtgcagaaggtcgaggccgggcgggggttttgctatcctgttgccaatctacaagaggggagagcgcatgacgcaaggcgcagtgaaaacaacgggtaaacgtagccgcgcagtaagcgcgaagaaaaaagcgattcttagcgcagcactggacacttttagtcaattcggttttcacggcacaaggctggagcagatcgcagagttggcgggtgttagtaaaaccaatctgctgtattactttccgagtaaagaggcgctgtatattgccgtgctgcggcagattctcgatatctggctggcaccgttaaaagcgtttcgtgaagatttcgccccgctggcggcgatcaaagagtacatccgtctgaagctggaagtcagtcgcgattatccgcaggctagccgcctgttctgtatggagatgctggcaggcgcgccgctgttaatggatgaactgacgggcgatttgaaggcattaattgatgagaaaagcgcgctgattgccggttgggtcaaaagcggcaaactcgcgccgattgatccgcagcatttgatttttatgatttgggcttccactcaacattacgccgatttcgcccctcaggtggaggcggtgacaggcgcgacgttgcgcgatgaggtatttttcaatcaaacggttgaaaacgtgcagcggattattattgaggggattcgaccacgttaaagatgccggaggaggttgtaacatcctccggctacctgtttaacctatagtcattaagctggcgttaccgccagcggcagcggtattcacactcaggctacgctcgatatacagccgttccagaaggatattgctttcgccacgggcaaaaccctgcacgctaacaattgtgccatcccgcgcggcaactgcttcacacaatgcgcgaagctgatcgctatcaccgtggaagatcaccgcatcaaacggttgagcggttatattttccgctttcgccagttgaatacgttcgctgactgcgcttggcaatgccttcactaactgacgatgcagcgcgtcatccggccacagtacctggctgcccaccgccagcacggcggcgagctgagtcagcgcatcctgctcatcatcggcaatacacaacacgcgctcacgcggcagcagcgtccaggtgttgcgttcacccgtcggccccggcagcaatcgttgtgttcctgcctgcgccagctcgccatattgcgtacataacgcctgcaattctggacgatttgctgcccattcccgcagtgcatttagcggctgagtcaatgcggctttcaactgcgcatcgaccggatactttgcatcctgacgcgcgagcgtcactgccagcgcactttccgggcgattcgccagcagacggtagagatagagcggaccgcctgctttcggcccggtaccggacaacccttcgccgccgaacggctgcacaccaaccactgcgcccaccatattacggttaacatacaggttaccaacatgggcgctgccagtgacctgggcgatggtttcatcaatgcgcgtatggacgccaagcgtcagaccataaccggaagcgttaatctgctcgatcagctctggtagctggttacggttgtaacgcaccacatgcagcaccggaccaaagacctctttttgcaattcggcaaagtcatccagttcgatcagcgtcggggcgacaaaggtgccgctttgccattcacgggcatcttcgctgttttcccgcaccgcctggaacaccggacggcctttgctacgcatggtctgaatatggcgctcaatattggctttcgcttcgctatcaatcactggaccgatatcggtggtcaggcgacccggattacccatccggcattcggccattgcgccgcgcagcattttcaacgtgtggtcggcaatctcatcttgcaggcacagcacgcgcagcgcgctacaacgctgacccgcactgtcgaacgcgctggccagtacatccacgacgacctgttcggtcagtgcactagaatcgacaatcatcgcgttcatgccgccggtttcagcgatgagcggaatagggcgaccctgagcgtccaggcggctggcgatattgcgctgcagtaacgtagcgacttcggtactaccggtaaacatcaccccgcgcacgcgatcatcacccgtcagttgcgcgcccacggtttcaccccgacctggcagcaattgcaccacgcctggcggtacacccgcttccagcaaaatggcgatcccttgcgcggcaatcagcggcgtttgttctgccggttttgccagcacgctgttacctgccgccagtgcggcggcgatctgcccggtgaaaatagccagcgggaagttccacggactgatacacaccacaggccctaatggacggtgggtttcgttagcgaaatcatcccgcacctgtccggcgtagtagtggagaaaatcgaccgcttcgcgcacttcggcaatggcgttactgaaggtttttccggcctcacgcaccagaataccaatcagttgctgcatctggctttccatcagcacggcagcgcggtgcaaaatcgctgcgcgttcagccggaggcgtggcaaaccagattggcgcgttattaaccgcactttccagcgcctgttctacttcacgcggcgtggcttcacgcacatagcccacaatatctttcggttccgcagggttaataacggggctcatctcacctgccgctaccggttgttccagcattggcaaggcctgccatttttgcagtgcactattgagcagggcagaggagaggctggccaggcggtgttcgttagcgagatccagccctgcgctgttgtcgcgcccgtgaccgtaaagatcgcgcggcaggggaattttcggatgcggtaatccagtttgcccttcctgttgcgccagtttttctacagcagtgaccggatcggcgaccagttcatccagtggcaaagaggtgtcggcaatacggttaacaaagctggtgttagcaccgttttccagcaggcgacgcaccagatacgccaacagcgtttcatgtgtgccaaccggagcataaatacgacacggacggttaagtttgccgtcggcaactttcccggggacctgctcatacagtggctcgcccataccatgcaggcactggaactcgtactgacccgggtagtagttctgccccgccagttgataaatcgccgccagcgtatgggcgttgtgcgtcgcgaactgcgggtagattagattcggcaccgccagcagctttttcgcacaggcgagataagaaacgtcggtatacaccttgcgggtataaaccggataaccttcaaggccgtccatctgcgcacgcttaatttcactatcccagtacgcgcctttcaccaggcgaatcatcagacggcgacggctgcgggtggcgagatcaatcaggtaatcgatcaccaacgggcagcgtttttgataagcctgaataacaaaaccgatgccgttccagcctgccagttccggctcgaaacagagtttttccagcagatcgagggagatctccaggcgatcggactcttcggcgtcaatgttgataccaatatcgtactgacgcgccagcagggtgagacttttcagacgcgggtaaagctcttccattacccggtcatactgggcgcggctataacgcggatgcagcgcgctcagtttgatactaatgcccggcccttcatagatgccacgaccgttagacgctttaccgatggcgtgaatcgcctgctgataggaaaccatatacgcctgtgcatctgcggcggtcagcgcggcttcgcccagcatatcgtaagagtaacggaaacctttctcttccagcttgcgggcattggctaacgcttccgcgatggtttcgccagtgacgaactgctcacccatcaggcgcatcgccatatccacacctttgcggatcagcggttcaccgcttttaccgataatgcggttcaggctgcgggagaggctggcttcgttatgggtggaaaccagtttgccagtaaacagcagcccccaggtggcggcattaacaaacagactcgggctacgaccaatgtgactctgccagttaccgttgctgattttgtcgcgaattaacgcgtcgcgggtggctttgtcgggaatacgcaacaacgcttccgccagacacatcagcgccacgccttcctggctactcaggctaaactcctgcaataacccctggaccatacctgcgcgaccactggcatttttttgattacgcagtttatcggccagctgatacgccagtttgtgcgcctgttcagcaactggctgcggcaggcgggcttgttccagcagcatagaaaccgcttcggtttccgggcggcgataggccgcggtgatcgcggcgcgggaaacgctctggggcaatatttgctcggcaaagtcgaggaatggctggtgtggttcctctgccggagtcggtgcttcatcgctctcattggccgcgccagaaagcagcgcaggtagctccggcagagtatcgctgttttccagttgttcgagataagaaaaaatcgcctgcttaattaaccagtgtggtgtgcgatcgatacgtgtcgcggcagacttaatacgctcacgcgtcgcgtcgtccagcttaacccccatggtggtggttcccatgccattactcctgttgttcagaaaggtgcaacttaacgttatcgtgaaatatccatgatgttgcaactttgtgcaaccatgttaaatgtgacatgcgtagcaagcttaaaaatgaatgaaatgttaataaaagaaatcgatatgacagggattaaaaaaataactcagactttttctctgcggcagttaacatttttgaaaggtgcaaccgcaaaaaatgtgagagagtgcaacctgatgaaaaatagtgtcgctgagcactaaaatttaatgtaaatggtgtgttaaatcgattgtgaataaccagcgcttccggcaggatacggtcgccctggtaaaacataaactctgttaccccgttccggtggcagatataacggcaagtttcgacattgccgataataattttttggagactttagatggctattagcacaccgatgttggtgacattttgtgtctatatctttggcatgatattgattgggtttatcgcctggcgaagtacgaaaaactttgacgactatattctgggcggtcgtagtcttgggccattcgtgacggcattaagcgcgggtgcgagcgatatgagcggctggctgttaatggggttgccgggcgctgtttttctttccgggatttccgaaagctggatcgccattggcctgacattaggcgcgtggattaactggaagctggtggccgggcggttgcgtgtgcataccgaatacaacaataacgccttaacactgccggattatttcaccgggcgctttgaagataaaagccgcattttgcgcattatctctgcgctggttattttgctgttcttcaccatttattgcgctagcggcattgtggcaggcgcgcgtctgtttgaaagtacctttggcatgagctacgaaacggctctgtgggcgggcgctgcggcgacgatcctttacacctttattggcggtttcctcgcggtgagctggactgacactgtacaggccagcctgatgatttttgccctgatcctgacgccggttatcgtcattatcagtgtcggtggctttggtgacagcctggaagtgatcaaacaaaagagcatcgaaaacgttgatatgctcaaaggtctgaactttgttgccattatcagtctgatgggttgggggctgggttacttcgggcagccgcacattctggcgcgttttatggcggcggattctcaccacagcattgtccatgcgcgtcgtattagtatgacctggatgatcctctgcctggcaggggcggtggctgtcggcttctttgggattgcttactttaacgatcatccggcgttggctggtgcggtaaatcagaacgccgagcgtgtgtttatcgaactggcgcaaattctgtttaacccgtggattgccgggattctgctgagcgcaattctggcggcggtaatgagtaccttaagttgccagctgctggtgtgctccagtgcgattaccgaagatttgtacaaagcgtttctgcgtaaacatgccagccagaaagagctggtgtgggtagggcgtgtgatggtgctggtggtggcgctggtggcgattgcgctggcggcaaacccggaaaaccgcgtgctgggcttagtgagctacgcgtgggcaggctttggcgcggcgtttggtccagtggtgctgttcagcgtgatgtggagtcgcatgacgcgtaacggtgcgctggcggggatgatcatcggtgcgctgacggttatcgtctggaaacagttcggctggctgggactgtacgaaattattccgggctttatcttcggcagtattgggattgtagtgtttagtttgctgggtaaagcgccgagtgcggcgatgcaaaaacgctttgccgaggccgatgcgcactatcatagcgctccgccgagtcggttgcaggaaagctaagggacttagcctgcggcggttttgtttggcttcagcagcgggttgcgctcccttaatgtgcctcgccatataaattgaatggtgcagggagcgcgcagggggcggccaatcgccgccgccccctgctgtcccggccttcggggaacgcttcagcgattttgacgccaccaacacccgagctgttattatgttccgggcaaaaagttagatttgataatcgcggatggacgaaattgcttgatacacccgcttatcagttttacatggaagctctgatgcattgagtctggacagttttgtcggctggatacggcgtttacgcggcatccggcaagaacacatggttctttgcaaacaatcccatctttctaccctggaataatcgtttatatcccttggcattacctctctttgtttacattccaacatcattttataaacattccgcttgtgtttttctttgccgtaatgataatcgctatcactgcgatttacttttctttgcatagattgactcagaaaaacgtttaagggtgggtggcatgtttgttccgtttctcattatgttgcgcgaaggacttgaagccgcgctgattgtcagtttgattgccagctatcttaagcgtacccagcgaggccgatggattgtgtgatgtggattggcgtgttgcttgccgctgcgttgtgcctgggcttgggtatcttcattaacgaaaccaccggcgaatttccgcaaaaagaacaggaactgtttgaaggtatcgtggcggtgatcgccgtggtgatccttacctggatggttttctggatgcgcaaagtgtcgcgcaacgtcaaagtgcaactggaacaggcagtcgatagcgcattgcagcgtggaaatcatcatggctgggcgctggtgatgatggtcttttttgccgttgcaagggaagggctggagtcggtctttttcctgctggcggcatttcaacaagatgtcgggatctggccgccgctgggtgcaatgctcggtcttgctactgccgtggtgctaggcttcctgctctactggggcggtattcgcctcaatcttggtgcattttttaaatggaccagcctgtttattctcttcgtcgccgcagggctggcagctggtgccattcgcgcatttcatgaagccggattgtggaaccactttcaggaaatcgccttcgatatgagtgcggtgctctcaactcactcgctgtttggcacgctgatggaagggatttttggctatcaggaagcgccgagcgtcagcgaagtcgccgtctggtttatttatctcatcccggcgctggtggcatttgctctgccaccacgcgcaggggcgacagcgtctcgctccgcgtaacaaatacgacgcaaactcttgcttagttacaacatactttaaagggatagtctcgtcatgaccattaacttccgccgtaacgcattgcagttgagcgtggctgcgctgttttcttctgcttttatggctaacgccgctgatgtgccgcaggtcaaagtgaccgtgacggataagcagtgcgaaccgatgaccattacggttaacgccgggaaaacacagttcattattcagaaccacagccagaaggcgctggagtgggagatcctcaaaggcgtgatggtggtggaagagcgggaaaatatcgcccctggctttagccagaaaatgacggcgaatttacagcctggcgaatacgatatgacctgcggtctgctgactaacccgaaagggaagttgatcgtcaaaggtgaggcaacggcggatgcggcgcaaagtgatgcgctgttaagtcttggtggtgcaattactgcatataaagcgtatgtcatggcggaaaccacgcagctggtgaccgacaccaaagcctttaccgacgcgattaaagcaggcgatatcgaaaaagcgaaagcactgtatgcaccgacgcgccagcactatgagcgtattgaaccgattgctgaactgttctccgatctggatggcagcattgacgcccgtgaagatgattacgagcaaaaagccgccgacccaaaattcactggtttccaccgtctggaaaaagcattgtttggcgacaacaccaccaaagggatggatcagtacgctgagcagctttataccgatgtggtcgatttgcaaaaacgcatcagtgaactggctttcccacctagtaaagtggtcggcggcgcagccggactgattgaggaagtggcagccagcaaaattagcggtgaagaagatcgctacagccacaccgatctgtgggatttccaggctaacgttgaaggcagccagaaaattgtcgatttgctgcgtccacaactgcaaaaagccaacccggaactgctggcaaaagtcgatgccaactttaaaaaggtcgataccattctggcgaaataccgtactaaagacggttttgaaacctacgacaaattgaccgatgccgaccggaatgcactgaaaggaccgattactgcgctggcggaagatctggcgcaacttcgcggtgtgctgggactggattaagcgttatgcagtataaagatgaaaacggcgtgaatgaaccgagtcgccgacgtttactgaaagtgataggtgcactggcgctggcgggaagttgtccggtcgctcatgcacaaaaaacgcaaagtgcgccgggtacgcttagtccggatgctcgcaatgagaaacagccgttttatggtgagcatcaggcagggatcctgacgccacaacaggccgcaatgatgctggtggcgtttgatgtgcttgccagcgataaagccgatcttgagcggttgtttcgcttgttgactcagcgttttgcttttctgactcagggcggagcagcaccagaaacgccaaatccgcgcctgccaccactcgattccggcattcttggcggctacattgcgcccgataatctcaccatcacgttaagcgtgggtcacagtttgtttgatgagcgctttggccttgcgccacagatgccaaaaaagctgcagaagatgacgcgtttccccaacgacagcctggatgcggcgttatgtcatggtgatgtgttgctacagatttgcgccaacacccaggacacggttatccatgcgctgcgcgatatcatcaaacacacgccggatttgctcagtgtgcgctggaagcgggaagggtttatttccgatcacgcggcgcgtagtaaaggcaaagagacgccgattaatttgctgggtttcaaagacggcactgccaatcccgatagccagaatgataagttgatgcaaaaagtggtgtgggtaacggcagatcagcaggagcctgcgtggacaatcggtggcagctatcaggcagtacgcttgattcagtttcgagtggaattttgggacagaacgccgctgaaagaacagcagacgatttttggccgtgataagcaaaccggtgcgccgctgggaatgcagcatgagcatgatgtgcctgattacgccagcgacccggaagggaaggtgatcgcgctggacagccatatccggctggcgaatccccgcacggcggagagtgagtccagcctgatgctgcgtcgtggctacagttatagtctgggcgtcaccaactccgggcaactggatatggggttgctgtttgtctgctaccaacacgatctggaaaaaggcttcctgacagtacaaaaaaggctcaatggcgaagcgctggaggaatacgttaaacctatcggcggcggttatttttttgcgctgccgggggtgaaggacgcgaacgattatttcggaagcgcgttattgcgggtttaatgtttttaggcggataaggcatttgtgcgcagatgcctgatgcgacgcttgcgcgtcttatcatgcctacaatcagtgcgggtttggtaggctggataaggcgttcacgccgcatccggcgatcgtgcactgatgcctgatgcaaatcctgctgaaagcacacagcttttttcatcactgtcatcactctgtcatctttccagtagaaactaatgtcactgaaatggtgttttatagttaaatataagtaaatatattgttgcaataaatgcgagatctgttgtacttattaagtagcagcggaagttcccggcagtgatagtcagtcactatggagatcgcggatggtaacgtcctgtactggacatgttttagataatcaacgcgccaccactcgcggagttttctcctccggtagtcatctcgtcactttgcattttcaacctcatcctttctttagttgtgttaccgacgccgtaaacggtgcgcgtagccgttttagcgcattttatccaaaagcaaactatggcttacaaggaagccaaccctctgatgttcgtgcgcataatcgcgctgccaacggcgcgtgtgatgaatacaaacaactcaaggtgctctccatgggaagacaaaaagcagtgatcaaagctcgtcgcgaggcaaaacgtgtgctgagacgggatagccgcagccataagcagcgtgaagaagaaagcgtcaccagccttgtgcagatgggcggcgtagaagccattggtatggcccgcgacagtcgcgatactagccccatcctcgcgcgaaatgaagcgcaattgcactatctgaaggctattgagagtaagcagctgatattcgccacgggcgaagccgggtgcggaaaaacctggatcagcgcagcaaaagcggcagaggccctgatacataaggatgtcgacaggattatcgtcacccgtccagttctgcaagccgatgaagatcttggcttcttacctggagatatcgcagaaaagtttgctccctattttcgcccggtctacgacgtgctggtccggcgcttaggggcttcctttatgcagtactgcctgcgaccggaaatagggaaggtggaaattgcgccgttcgcctatatgcgtggacgtacctttgaaaatgcagtcgtcattcttgacgaggcgcagaatgtgactgccgcgcaaatgaaaatgtttttaacccgcctcggggagaacgtgacggttatcgtcaacggtgatatcacgcaatgcgatttgcctcgcggcgtgtgctccggattaagtgacgcgctggaacgtttcgaagaagatgaaatggttgggatcgtccggttcggtaaagaggactgcgtacgtagcgcactttgccaacgtacgctgcatgcctacagttaagtgtgttatcggtgcagagcccgggcgaaccgggctttgttttgggtgttcccggtgtgtgcaatatacgaaaaaaaagcccgtactttcgtacgagctcttctttaaatatggcggtgagggggggattgactcgcttcgctcgccctgcgggcagcccgctcactgcgttcacggtctgtccaactggctgtcgccagttgtcgaaccccggtcggggcttctcatccccccggtgtgtgcaatatacgaaaaaaaagcccgtactttcgtacgagctcttctttaaatatggcggtgagggggggattcgaacccccgatacgttgccgtatacacactttccaggcgtgctccttcagccactcggacacctcaccaaattgtcgttcctgtcttgctggaacgggcgctaatttagggaaatcatgacctgaggtcaacaaactttttgaaaaaatcgcgcgtttattcaaacttcaatcaatgtgtggttttaataagcgaaatctgctttttttgccaccgaccacggatttgttatgctggtggcctttgtagatcataacgataagtgcgaataaatttcgcacaacgcttttcgggagtcagtatggatatcatcttttatcacccaacgttcgatacccaatggtggattgaggcactgcgcaaagctattcctcaggcaagagtcagagcatggaaaagcggagataatgactctgctgattatgctttagtctggcatcctcctgttgaaatgctggcagggcgcgatcttaaagcggtgttcgcactcggggccggtgttgattctattttgagcaagctacaggcacaccctgaaatgctgaacccttctgttccactttttcgcctggaagataccggtatgggcgagcaaatgcaggaatatgctgtcagtcaggtgctgcattggtttcgacgttttgacgattatcgcatccagcaaaatagtagccattggcaaccgctgcctgaatatcatcgggaagattttaccatcggcattttgggcgcaggcgtactgggcagtaaagttgctcagagtctgcaaacctggcgctttccgctgcgttgctggagtcgaacccgtaaaagctggcctggcgtgcaaagctttgccggacgggaagaactgtctgcatttctgagccaatgtcgggtattgattaatttgttaccgaatacccctgaaaccgtcggcattattaatcaacaattactcgaaaaattaccggatggcgcgtatctcctcaacctggcgcgtggtgttcatgttgtggaagatgacctgctcgcggcgctggatagcggcaaagttaaaggcgcaatgttggatgtttttaatcgtgaacccttaccgcctgaaagtccgctctggcaacatccacgcgtgacgataacaccacatgtcgccgcgattacccgtcccgctgaagctgtggagtacatttctcgcaccattgcccagctcgaaaaaggggagagggtctgcgggcaagtcgaccgcgcacgcggctactaataaagcatcaggattcctgctatccttggcgggaattgaatacaggagagagttatgtatcccgtcgaccttcatatgcataccgttgccagcacacatgcatatagcacattaagtgattacattgcccaggccaaacaaaagggcattaaactttttgcgatcaccgatcatggcccggatatggaagatgcgccgcatcactggcacttcattaacatgcgtatctggccgcgagtggttgatggggtagggatcctgcgcggcatcgaagctaacattaaaaatgttgatggtgaaattgactgcagcggtaaaatgtttgacagcctggatctaattattgccggttttcatgagccggtttttgcgccacatgataaagcgaccaatacacaagcgatgatcgccactatcgccagcggcaatgtgcatataataagccatcccggaaatcccaaatatgaaatagatgtgaaagccgttgctgaagcagccgcgaaacatcaggtggcgctggaaatcaataattccagttttttacacagtcgtaagggcagtgaagacaactgtcgtgaggtagccgcagcggtacgtgatgctggaggttgggtggcattaggcagcgattctcacaccgcgtttaccatgggggaatttgaagagtgtcttaaaatcctcgacgcggtagattttccgccagagcgcattttgaatgtttctccgcgccgcttactgaacttccttgaatctcgcggtatggcaccgattgcggaatttgcagacctttaattactagtaatggaaatatattaatgaacgagttttctatcctctgtcgtgtgctgggtagcctctattaccgccaaccacaagatcctttactggtgccgctgtttaccctgattcgtgaggggaaactggctgcgaactggccactggagcaggatgagttgctgacacgtttgcagaaaagctgtgatatgacgcaagtctctgccgattacaatgcgttgtttatcggcgatgaatgtgctgtgccgccatatcgtagcgcatgggttgagggcgcgacggaagcggaagtgcgcgcttttctttctgagcgagggatgccattagcggatacgccagccgatcacatcggcacattgctgctcgcagcttcctggctggaagatcagagtacggaagatgagagcgaagcactggaaacactgttcagtgagtatctgttaccctggtgtggtgcgttccttggcaaagtggaggcccatgcaaccacgcctttctggcgcaccatggcaccgctaacccgcgatgccattagtgcaatgtgggacgagctggaagaagattctgaagaataagtgtgatctacgtcactcataactgcaacggataatttgttgttgcataaaatgtgtgctcgatctcattcatggccgcgttttctgctatcatgcgcggcatgaacatacttctctctattgcaatcacaacaggcattctctccggtatctggggatgggtggctgtttccctgggcttactaagctgggcgggcttcctgggctgtacggcctactttgcctgcccgcaaggtgggctgaaagggctggcgatctccgctgcaaccctgcttagtggcgtggtgtgggcgatggtcattatttacggtagtgcactggcaccacatctggaaattctcggttatgtcataaccggtattgtcgcgtttctgatgtgtattcaggccaaacagctgctgcttagttttgttccggggacgtttataggcgcatgcgcgacgtttgccgggcagggtgactggaaactggtgttacctagcctggcgcttgggctgatatttggttacgcaatgaaaaacagtggcctgtggctggcggcgcgtagtgcaaagacggcgcaccgtgagcaggaaatcaaaaataaagcgtgaggggcactcacgctttcgcttaaacagtaaaatgccggatgataattccggcttttttatctgtcaggattccggtggaacgctcatatggcggtatttcaccagaatgtcattctgccgttctgctttattttgcaaatcccacagaccacggtcgataccatcattaatcaggaaaatgacccctgtttcgatagcgctcatcaggcacagcataacaggttcgttgctggtgtaacccacttccccttcaagcaagcgctggtagtcaataaagcggaaaaccccggcctgaacttcataggaaagtatcgtcttactggtgttcacgctagaaaggatctcgccggtactcacattgacgacgcgcaggttcacggcaatctgatcgagctggtattgcgtgtcggcaccgatgccaaaatatcttgccccaaccccgccagatttgacgttgctttcataaccgataatgctaccttcaaccatgatatttgccgccgttaaagattgcagcgggattcggttattaatggcaaccgtgccgttttcttgtgccgcacgaataatcttgcgctcgttaagcaggttttgtaagccctggcgctccagcggtataaaccagcgagaatctttcagtgccgtgaccagcattgccgtggcgctttgcggaacagcagtggagaagttacttgccgggtagggtttaaattgcccggtttcgtcctgaatgttgtatacgctaacaaagattttacccgtcggcgctggcagatgggtcaaatctttgtagctctgagcacgaggcattaatgtcggtctggcggcttctttaggcggggcggttaagcatccgctcagtaacatgacggcaaccaaaagaaataagcgctgcatgattattttccttatgaagctggggcttaaaaatcggtactgttattttgtaaaccgctaacctggatggtgctggtttgtccggttttacgatctgtcacgttcaactgcaattgaccatcgcggttggcaatatcgacaatataatcgttggtcaccatgcggcccggtttaccggtattaatattgctcagtagcccacctaaaatttgactctggatggcctgagtaaagttatctaacgcactgggtgtttcaataccaaagtcatcgttatagctcggatctttataagagttttgggcctgagcgctatttaataaaaaagcgccattatttgggttaccaccaaagtttggattacggaactggaaagtcatggttccagcccaacttaatgggctaataagcatgagtagaactactgcatgtttgacacgcattgcagcctccgaacaattttttatttagaattcatcatgcgccaaatcgcccgtacttaataacgcctgatttatctggcgacgatttagtgcttcttcagtttgaatcagtgcaaagacgacagttttctcgaagtctcttttcaacggaaataaaaaagtctggaaaataacgtcctgattgaccgttatagtgatccagcttccccatcgtgcactgggcctttcattaatcgttaagttacccgtatagtcactttcccatttatcactaaaggctcggtaaaaatcatggccaatagaactaacagtatggtcagttagcaatcccgggacttctacctcaacggcgtgaagattccctgcggcgaacagaaattctgccgccacaatccagcgtaaataacgtttcatggctttatcgcctgaggttatcgtttgcccaggaaaccgcttgtgtccggttttttacggctatcttcttgaaaagattataaagatgcgttttaaccgtattttcgctgatgaacaagctacgagcgatctcgttattagacgcgccgatacgcagcttattcaggatctctttttcccgatgagtaaggagggcactttccgtgctgttataacgatagttaccactatgcgtaatcaggtagctggcaagcttttgcgtaaagtagcattcgccgcgcaggacgccttgcaacccattgacaacacgttcttgatcctccatggaataaaaaacgccgttgatatgaggccagttttcaatgtcgcggtacgggtaatcttcaggcgtatttagcaacaatattttgatattgttgtttttcctgctcaaagtatcctgccaataatggataagctttttatccgcttccatcatatccagaagaataatagagccactagagatatcgtccagagaacgttgaatattatgtaattttcctgtaattgccaggctttgtttaaggtgctgcaagagagctgtcgcctgcaaagaagatttagtgatcaacaataatgtatgaccatgaatactatggacttcattaaacatgatgaaaccccgctttttttattgatcgcacacctgacagctgcctctaaaatagaagcaccagaagtactgacagatgttgcactgctgtgtgtagtaataaatcagccctaaatgggtaaaatataaaactaatggattacatctgatttcaatctagccattacaaatcttaaatcaagtgttaaacatgtaactaaatgtaactcgttatattaaaatgttaaccttaaggttttattaagtttagaaatgatagaaaagttgtacatttggtttttattgcacaattttaaaaaatcatacaaatggtgataacttactaataatgcatataaaaaatatttcggtgtagtcctttcgtcatgtaaaacgttcttgttttttctccacacctccgtggacaattttttactgcaaaaagacgaggtttgtcacggcttgtgcgcaagacatatcgcagcaatcagcgacgggcaagaagaatgactgtctggtgctttttgatagcggaaaacggagatttaaaagaaaacaaaatatttttttgcgtagataacagcgtatttacgtgggttttaatactttggtatgaactaaaaaagaaaaatacaacgcgcgggtgagttattaaaaatatttccgcagacatactttccatcgtaacgcagcgttaacaaaatacaggttgcgttaacaaccaagttgaaatgatttaatttcttaaatgtacgaccaggtccagggtgacaacatgaaaaacaaattgttatttatgatgttaacaatactgggtgcgcctgggattgcagccgcagcaggttatgatttagctaatagtgaatataacttcgcggtaaatgaattgagtaagtctagttttaatcaggcagccataattggtcaagctgggactaataatagtgctcagttacggcagggaggcagtaaacttttggcggttgttgcgcaagaaggtagtagcaaccgggcaaagattgaccagacaggagattataaccttgcatatattgatcaggcgggcagtgccaacgatgccagtattagccaaggtgcttatggtaatactgcgatgattatccagaaaggttctggtaataaagcaaatattacacagtatggtactcaaaaaacggcaattgtagtgcagagacagagccaaatggctattcgcgtgacacaacgttaatttccattcgacttttaaatcaatccgatgggggttttacatgaaacttttaaaagtagcagcaattgcagcaatcgtattctccggtagcgctctggcaggtgttgttcctcagtacggcggcggcggtaaccacggtggtggcggtaataatagcggcccaaattctgagctgaacatttaccagtacggtggcggtaactctgcacttgctctgcaaactgatgcccgtaactctgacttgactattacccagcatggcggcggtaatggtgcagatgttggtcagggcagtgatgacagcagtatcgatctgacccaacgtggcttcggtaacagcgctactcttgatcagtggaacggcaaaaattctgaaatgacggttaaacagttcggtggtggcaacggtgctgcagttgaccagactgcatctaactcctccgtcaacgtgactcaggttggctttggtaacaacgcgaccgctcatcagtactaatacatcatttgtattacagaaacagggcgcaagccctgttttttttcgggagaagaatatgaatacgttattactccttgcggcactttccagtcagataacctttaatacgacccagcaaggggatgtgtataccattattcctgaagtcactcttactcaatcttgtctgtgcagagtacaaatattgtccctgcgcgaaggcagtagtgggcaaagtcagacgaagcaagaaaagacccttagtttgcctgctaatcaacccattgctttgacgaagttgagtttaaatatttccccggacgatcgggtgaaaatagttgttactgtttctgatggacagagtcttcatttaagtcaacaatggccgccctctagtgaaaagtcttaatttgttgaaatatcgagcataagatgaatctggagagaatggtctgctgcgaatcagccaacctgaaagtatggataacacaaccctcaaggatgactaatcattgaggaaatagaataaatgttcagaccttttttaaactctcttatgctcggcagtttgttttttccttttattgccattgctggaagcaccgtgcaagggggcgtgatccatttttatggccaaattgtggaaccggcatgtgacgtcagcacccagagtagtcccgtagaaatgaactgcccacagaatggttctattccgggcaaaacctactccagcaaagcgttaatgagcggcaatgtcaaaaacgcgcaaatagccagtgtaaaagtgcagtatcttgataaacagaaaaagctggctgtaatgaacatcgaatataactaagtttctgaacaactcacgttgctgagcagaaaaatgcgatttaaccaaaaagcctgctgtacacttaagaaacaagaaggtgtaaggaggcgttatgaaaacgcgtattcatgttgtgcagggtgatattaccaaactggccgttgatgtgattgtgaatgcggctaatccgagtttaatgggaggcggcggcgtcgatggggccattcatcgcgcagcgggtccggccctgctggatgcttgtttaaaagtcaggcaacagcagggcgattgccctacggggcatgccgttattacgcttgcaggcgatcttcccgctaaagccgtagtgcacaccgtcgggccagtctggcgtggtggtgaacaaaacgaagaccagcttttgcaggatgcctatctcaatagcctacgactggtggcggcaaacagctatacgagtgtggcttttcctgcaatcagtactggggtttatggttaccctcgtgcggcagcggctgaaatcgcagtaaaaaccgttagtgaatttattacccgtcacgctttacccgaacaggtatactttgtctgttatgatgaagaaaacgcccacctctacgaaagactccttacccaacaaggagatgaatgatttgccccggctggcgagcgcggtgctgccactgtgtagccaacatcccggtcagtgtggcctttttcctctggagaaaagtctggatgcgtttgccgcccggtatcgtctggccgaaatggcagagcatacgctcgatgttcagtattacatctggcaggacgatatgagcggtcggttactgttttccgccctgttagccgcagcaaagcgtggcgttcgcgtccgtttgttgctggacgacaacaatacgcccggacttgacgacattttacgcttgcttgacagtcatccacgcattgaagtccggctttttaatcctttcagctttcgcttgctgcgtccgcttggttatatcaccgacttttcccgtcttaatcgccgtatgcacaataaaagtttcactgtcgatggcgtggtgaccctggtgggaggacgaaatattggtgatgcctattttggagcaggggaggagccactttttagcgatttagatgtcatggcaataggacccgtggtagaggacgttgccgatgatttcgcccgctactggtattgcaaaagcgttagtcccttacagcaggtgctggatgtcccggagggtgaaatggcggatcgcatcgagttacccgcctcctggcataacgatgccatgacgcatcgttatttacgcaaaatggaatccagtccatttataaatcatctggttgatggaacattgccgcttatctgggcgaagacacgtttattaagtgatgatccggcgaaaggggagggcaaggcaaaacggcatagtctgttaccgcagcgcctgttcgatatcatgggcagtcccagtgaacgcatcgatattatctcttcctattttgtaccgacacgcgcaggtgtggcgcaactcttacggatggtgagaaaaggggtaaagattgcgatcctaaccaattctcttgccgctaacgatgttgctgtcgtccatgccggatacgcgcgctggcgcaaaaaattgctccgctatggcgtggaattatatgaactcaagccgacgcgtgaacaaagtagtacgttacacgatcgcggcataaccggtaattccggagccagcctgcatgctaaaacctttagcatcgatggtaaaacggtgtttatcggctctttcaatttcgatccgcgtagtacattgctcaatactgaaatgggcttcgtgatagagagcgaaacgctggcacagttaattgataaacgctttattcagagccagtatgatgcggcctggcagctccgtctggacaggtggggacggatcaactgggttgatcgtcatgcaaagaaagagattattctcaaaaaagaacccgccaccagtttctggaagcgggttatggtcagactggcgagcatattgcccgtggaatggttattgtaaatgtggcttaacgggctggtgctttatcgttctcacgcttaacaaccggtttaccagagaacaaaaacttcagtaacgggatgcgcaaatgaatttcatacagaattatcgcaatccctactacaaatatcaggccacagagaaaaccaagccagttggaggtgatgtgcggtgtaatgtatgcgccgaaaaacagcgttaacgggtggtgaaccagatagataaacaggcttgcgttaacaaaataagtcacccgcgcactctggaagttaagcaaacggtggccaaaggagaagaccacattcaccatccacagaccgaggaccatggtgatcacgctctcggtttcgtacatccaggcatcgccactgccatagcgctggttgagtaaataagcgacaaacgccaatgctgctgcaagggtacagccacgagacggcgtggtaaacaaggctttaagatgagggaaaatgaaagccagtgcgccgaggataaagaacggcaaataaaacagcgtttgcatgacaataaaattgaacatgccattactcagaatgggcggatacacaataaaaatcgttcttcttattaccgcataaccgatgccgaggcataaaaaaatcacgcttagttttaccatgctgaattttttattcgttttatcagaattttctaaattatttctgatgcgcttaaatatccatacgcacagcgtcgtcatgaccactaacaccagtaaaaaccacaggtgacttattaattcccaggccaacgtattatatttgtcatacaaactcagcccaggccaactttccgcttttcctttgacatattgcagcataataaattgcggtaatgtcagtagggggatggctgttaacatcgggatacctacacgttcgacacgtactttccaccattttttcaagggatagcgtaaaaaaagcatgtaggaaaagtagccggatataacgaaaaatacctgcatgcggaagctgtggatgaagtcattaaaaagggtcagccacaaactactttcggcgctattcacatgccatgtatggctgctatagattaaagaaatatgaaaaggtatccctaacaacatcagccaggcgcggatggagtcgaggaaatattcacgttgcgcgggtactgggttcatatatggttaactaatctcggatttttcgtcttatccctgtcgggttatgcctttaggcttgttgccatagtgacaccgacctgaccgcgccaggcgcaggcttcaaggtttttatgcatagcatcatcgctaccactaaccagaatggaagcgtctgtaagacggttgataaataaatttgctggcaaaccctacacgaagtcgatgcttctgtctttaggagaagcacggaaagtgaaaacggttgcaatcaggtgcttaatccatgagccagcgtgctgaacgataccgggattctgttgtcggaatggctggttatccattaaaatagatcggatcgatataagcacacaaagggggaagtgcttactaattatgaaacataaactacaaatgatgaaaatgcgttggttgagtgctgcagtaatgttaaccctgtatacatctagtagctgggctttcagtattgatgatgtcgcaaagcaagctcaatctttagccgggaaaggctacgagacgcccaaaagcaacttgccctccgttttccgcgatatgaaatacgcggactatcagcagatccagtttaatcatgacaaagcgtactggaacaatctgaagaccccattcaaactcgagttctaccatcagggtatgtacttcgataccccggtcaaaataaatgaagtgactgccaccgcagtcaaacgaatcaaatacagcccggattatttcactttcggcgatgttcagcatgacaaagatacggtaaaagaccttggctttgccggttttaaagtgctttacccgatcaacagcaaagataaaaacgatgaaatcgtcagcatgctcggggccagctatttccgcgtgattggtgcaggtcaggtttatggcctttctgcccgcggcctggcaattgataccgccttgccaagcggtgaagaatttccgcgcttcaaagagttctggatcgagcgtccaaaaccgactgataaacgtttaaccatctatgcattgcttgacagcccgcgtgcgacaggtgcttacaaattcgtggttatgccagggcgtgacacggttgtggatgtgcagagcaaaatctatctgcgcgataaagtcggcaaactgggggttgcaccgttaaccagtatgttcctgtttgggccgaaccaaccgagccctgcaaataactatcgtccggagttgcacgactctaacggtctctctatccatgccggtaatggcgaatggatctggcgtccgttgaataacccgaaacatttagcggtcagcagcttctccatggaaaacccgcaaggctttggtctgttgcagcgcggtcgtgatttctcccgctttgaagatctcgatgatcgttacgatctccgtccaagcgcatgggtgactccgaaaggggagtggggtaaaggcagcgttgagctggtggaaattccaaccaacgatgaaaccaacgataacatcgtcgcttactggacgccggatcagctgccggagccgggtaaagagatgaactttaaatacaccatcaccttcagccgtgatgaagacaaactgcatgcgccagataacgcatgggtgcaacaaacgcgtcgtagtacgggggatgtgaagcagagcaacctgattcgccagcctgacggtactatcgcctttgtggtcgattttaccggcgcagagatgaaaaaactgccagaggataccccggtcacagcgcaaaccagcattggtgataatggtgagatagttgaaagcacggtgcgctataacccggttaccaaaggctggcgtctggtgatgcgtgtgaaagtgaaagatgccaagaaaaccactgaaatgcgtgctgcgctggtgaatgccgatcagacgttgagtgaaacctggagctaccagttacctgccaatgaataagacaactgagtacattgccgaagactgatatccgcgccgttcatcaggcgctggatgccgaacaccgcacctgggcgcgggaggatgattccccgcaaggctcggtaaaggcgcgtctggaacaagcctggccagattcacttgctgatggacagttaattaaagacgacgaagggcgcgatcagctgaaggcgatgccagaagcaaaacgctcctcgatgtttcccgacccgtggcgtaccaacccggtaggccgtttctgggatcgcctgcgtggacgcgatgtcacgccgcgctatctggctcgtttgaccaaagaagagcaggagagcgagcaaaagtggcgtaccgtcggtaccatccgccgttacattctgttgatcctgacgctcgcgcaaactgtcgtcgcgacctggtatatgaagaccattcttccttatcagggttgggcgctgattaatcctatggatatggttggtcaggatttgtgggtttcctttatgcagcttctgccttatatgctgcaaaccggtatcctgatcctctttgcggtactgttctgttgggtgtccgccggattctggacggcgttaatgggcttcctgcaactgcttattggtcgcgataaatacagtatatctgcgtcaacagttggcgatgaaccattaaacccggagcatcgcacggcgttgatcatgcctatctgtaacgaagacgtgaaccgtgtttttgctggcctgcgtgcaacgtgggaatcagtaaaagccaccgggaatgccaaacactttgatgtctacattcttagtgacagttataacccggatatctgcgtcgcagagcaaaaagcctggatggagcttatcgctgaagtcggtggcgaaggtcagattttctatcgccgccgccgtcgccgcgtgaagcgtaaaagcggtaatatcgatgacttctgccgtcgctggggcagccagtacagctacatggtggtgctggatgctgactcggtaatgaccggtgattgtttgtgcgggctggtgcgcctgatggaagccaacccgaacgccgggatcattcagtcgtcgccgaaagcgtccggtatggatacgctgtatgcgcgctgtcagcagttcgcgacccgcgtgtatgggccactgtttacagccggtttgcacttctggcaacttggcgagtcgcactactggggacataacgcgattatccgcgtgaaaccgtttatcgagcactgcgcactggctccgctgccgggcgaaggttcctttgccggttcaatcctgtcacatgacttcgtggaagcggcgttgatgcgccgtgcaggttggggggtctggattgcttacgatctcccgggttcttatgaagaattgccgcctaacttgcttgatgagctaaaacgtgaccgccgatggtgccacggtaacctgatgaacttccgtctgttcctggtgaagggtatgcacccggttcaccgtgcggtgttcctgacgggcgtgatgtcttatctctccgctccgctgtggtttatgttcctcgcgctctctactgcattgcaggtagtgcatgcgttgaccgaaccgcaatacttcctgcaaccacggcagttgttcccagtgtggccgcagtggcgtcctgagctggcgattgcactttttgcttcgaccatggtgctgttgttcctgccgaagttattgagcattttgcttatctggtgcaaaggaacgaaagaatacggcggcttctggcgcgttacattatcgttgctgctggaagtgcttttttccgtgctgctggctccggtacgcatgctgttccatacggtcttcgttgtcagcgcgttccttggctgggaagtggtgtggaattcaccgcagcgtgatgatgactccacttcctggggtgaagcgttcaaacgccacggctcacagctgctgttagggttagtgtgggctgttgggatggcgtggctggatctgcgtttcctgttctggctggcaccgattgtcttctcgttgatcctgtcaccgtttgtttcggtgatttccagccgtgccaccgttggtctgcgcaccaaacgctggaaactgttcctgatcccggaagagtattcgccgccgcaggtgctggttgataccgatcggttccttgagatgaatcgtcaacgctcccttgatgatggctttatgcacgcagtgtttaacccgtcatttaacgctctggcaaccgcaatggcgaccgcgcgtcaccgcgccagtaaggtgctggaaatcgcccgtgaccgccacgttgaacaggcgctgaacgagacgccagagaagctgaatcgcgatcgtcgcctggtgctgctaagcgatccggtgacgatggcccgtctgcatttccgtgtctggaattccccggagagatattcttcatgggtgagttattacgaagggataaagctcaatccactggcattgcgtaaaccggatgcggcttcgcaataaaaacgtagttgcctgatgcgctacgcttatcaggcctacatcgttcctgcaatttattgattttgcaagactttgtgggtcggataaggcgttcacgccgcatccggcaaaaacaacgagccaataaaaataccggcgttatgccggtatttttttacgaaagaggtatcaaatgcgtttaattgtggtgagcatcatggtgaccttgctgagtggctgtggcagcattattagtcgcactataccggggcaggggcatggcaaccaatattatcccggtgtgcaatgggatgtgcgtgactccgcctggcgttatgtcacgatccttgatctgccattctctctggtttttgatactttactgctgccgatcgacattcatcatggcccgtatgagtgattaacgttcatcccactcatcagctgctgcgcgtccttcctcggtatccagcggtggctcaagctgaaattccccctcgtcccattcatgtaatgtattctcttcctgccactcctggcgtatctctatctcatcatagtcgccatcaaaaacactttgcgcggcttcaccgctaagcataggtaaacattcaccttcttccccttcgtcggcaaaaaactcaacttgccacatgatgtcgccgtcctgcaaaacgtatttttgggcattgaactgttgcacattcgcatcttcggcgtcgatgccggggttgtctgcaagaaattcttcgcgtgcagcgtcaatggcttcttcaagcgttgcgtacatggtcatcacgattctccctttgagttgatgaggtttcagggaaaaggatagctgattctccgcttttgcaagtatgaaaggcgaaaaatcagttgcttacctggggtattcgacgacgacgtagactgttccaactatagactgcgttgaataacactacgccagcggtgacgagaaataccgctctgaaaccgtagttcgcactaatcgctgctcccatcaatggtccggtaacgttgccaatatcacgaaagctttggttatagctgaagatacgcccggcgatctggttgctgctgttgtaaaccaacagtgtctgtacggcggggagtagtgcaccatcggcggcaccgagcaaaaaacgtaaaatcccaagttgcaatggcgtctgaacgtaagacattgggatcaacagcagtacagaaaagatcagcgctgtaatcaggatcttttcgggtccgattcgatcgccaagtttgccgagtcgtggtgcacttagcagagccgccacgcctggcacgctggcgatcatgccactgataaaggcgacgttactgacgttacccgccagttcgcggacatacagcgtcagaatgggggcaatactgcccgtcgccacctggatgattaacgtagtgacaaacaggctgagtaccagtttcgggtttttaagacttgtcaccacttcccgcatgtgcagcatctcttttttgctgaccggctggaatttttctctgatgcaaaacagggtgacgaaaaagcagagtatgagcacactggcggtaataaagaataccggacgtaagccgtagctatcggcgagcaggccgccagccattgggccgagcaacgcaccactaacgccgcctgtggagagcgtacccagcgcccagccgcttttattacgcggtacttgtgtggcgataagagcattagcgttggggacaaatccgccaagtaacccaagaagcgcccgcaggatcaaaaactgccagatattttgtgccagccccatcaacaccatcacgatgcccatgccgagggcagagcgtaatagcatgagttttcggcctttacggtcggcgagtccaccccaaaacggactggcgatggcgctaaataaaaatgtaatgctgaagacaataccggaccacatattcagggcggagtgaccggtaacgccaagctgctcaacgtagaggggtaagaagggcattaccagactgaaggcggcaccggtaagaaaacagcctagccaggcgacgatcaggtttcgtttccagtttataggggtgtcattttcacagggactcatagcaatccgctgttggtgcgccaggcgcggtgaacataagaagaaaagataagcacactaattatgcgcccgacttccagggggcgcaatccagagagcttttatcgctaaatcagggggatttgctgtggtaatgccggatgccattctgaagcatccggcatgggagatttaatagcgactaggaacgccttccgggcgtgttttaaagcgacggtgtaaccacatatactgctctggtgccatcatgatgcatttttcgaccactttgttcatccacgcggcggtagtttcggcatcatccagtggcggagaacactctggcggcagcataatcaattgataccctttgccatctggcttacggcgtggaacgaagggcaccagacatgcgccggacatccgtgccagcatccaggttccggtcgtggtcgcagcctgctcaacggcaaacaacgggacgaaaacgctactgcgcgggccgtaatcatgatccggtgcgtaccagaccacttcgccttttttcagggctttaatcatgccttttaaatctttgcggtcgagcatgcttttattactgcgcaaacggccccaggtttgtagccagtcaatcagtggattatcgttcgggcgataaacgccaatacccggttcctgcataccaaactgccgcgcacccagctccagtgtcagaaaatggatgccaactaacaggatgccgcgtttttgcgcctgcacgtcacgaatgtgttccatgccgatcacttccgtccagcgggcgattcggcggtccggccagaaccacgccatgccggtttccatcaggcccatgccaacggattcgaaattcttcaccaccattttacggcgttcttgttcgctcatttccgggaagcacagttccaggttgcgatgcacaatttttgcgcgtcgtttcataaaacgtaacgccagttttcctaatccacaaccgaggcggtagataaccgggtagggcaattgcacgactaaccaaagtacgccaatacccaaccaggttaaccaataacgcggatgaagcagtgcggtggagaacttgggtagattcgtcatatcaatcctgtttttcaacctattcgggcaattgtatgtattgtcgcattttttcgcccgcaaccaaaatttgtggctgaagactgggcgaaattgccgcgcttgtaaataacaaataatttttaatgcgcaaatgtagcgtaaaatgtgtggatgttaattatcgataattgctatatcatgccgcggatttttactttcccatctcgcaggaaccgtacaccatgccagtgttacacaaccgcatttccaacgacgcgctaaaagccaaaatgttggctgagagcgaaccgcgaaccaccattagcttttacaagtatttccacatcgccgatcctaaggcgacccgtgacgctttatatcagctgtttaccgcgctgaatgtttttgggcgagtgtatctggcgcatgagggcattaacgcgcaaatcagcgtacctgcgagcaatgttgaaacatttcgcgcgcagctctatgccttcgacccggctttagagggtttacgcctgaatatcgcgttggatgatgacgggaaatccttctgggtactgcgcatgaaggtacgcgatcgcattgttgccgacggtattgacgatcctcactttgatgccagcaatgttggtgagtatctgcaagcggcggaagtgaacgccatgcttgacgatcccgatgcactatttatcgacatgcgtaaccactatgagtatgaagtggggcactttgaaaacgcgctcgaaattccggcagataccttccgtgagcagctgccaaaagcagtcgagatgatgcaggcacataaagataaaaaaatcgtcatgtactgcaccggcggcattcgttgtgaaaaggccagtgcctggatgaaacataacggattcaacaaagtctggcatatcgagggcggaattattgaatacgcccgtaaggcgcgcgagcagggcttgccggtgcgttttattggcaaaaattttgtttttgacgagcggatgggcgaacgtataagcgatgagattatcgcgcattgccaccagtgcggcgcgccgtgcgacagccataccaactgtaaaaatgatggctgccacctgctgtttattcagtgtccagtatgcgcggaaaaatacaaaggttgttgtagtgagatttgctgcgaagaaagcgcgttaccgccagaagaacagcgacgccgtcgggcaggacgtgaaaatggcaataagatctttaataagtctcgtggacgtctgaatacaacactgtgcattcctgatccaacagaataaatatcattgccggatgcgtgccatccggcaacatttcacgcttacttctgctgtacgccttccacactaataatcagatccacttcctgagaagctggacctaaatctgtcttgatattgaagtccttgagcttaattttgccttcggcctcgaagcctgcacgtttaccaccccatgggtcgtcgccctgaccaattaatttcgcttccagcgtgacgggtttggttacgccattcagcgtcagatcgccggtaatatccagttcgtcaccgtctttcttcacgctggtggaggtgaatgttgcctgtggatattttgcggtattgaggaaatctgcactgcgaagatgtttatcgcgttcggcgtgattagtatcgacgctggtggtgttaattgtcacattcactttatcggcagccggatttttttcgtcaaaggtaaaagtaccgtcgaaatctttaaaggtgccgtataaccagctatagccaaggtgctggatgcggaaattaacaaaggcgtgctgaccttctttgtcaattttgtaatcggcggcaaccgcactaccggcagagaacatcagggacgcgaaggttaaaccaagcaggctttttttcattttttatactccatagtcagaactgctctttcccagcatgcgcttcagagtgtcgtctttatcgatgaaatgatgcttcagggccataaatccgtgcataacggacagtactacgacgctccacgcgagccaaaaatgcagggcaccggcaaagtctgcctgtgcgccagcgtcggcaagggtcgcggggacgtcaaaccagccaaaaacgctgatcggtttaccatcggcagtactgatcagatagccgctgatgccgatggcgaaaagcaataggtacaatgcgagatgtccagctcttgcggcaagacgagtcatggggctataactcggcagcggacccggcggtggagatatgacacgccacagaacgcgaataaccagccccatcattaacaaaataccgatgcttttatgcagttcgggtgctttgtgataccagccatcgtaataactgagcgtgaccatccacagacctaaagcaaacatgccgtagacaataattgcgcttagccaatggaaggccgcagatataacaccatagcgttcaggggtatttgtgaaactcataagtgcatccaaaacgaatttgcgagagaaagaaaatggcgtgtcggagaatgaattgcaacacaaaaataacaaattgaatgatatttatttttatttcaataattttgaattaataatgaaagaatcttcataagtttagtgggttcagcatcagagatgtctggtgagtgctgtagaagcaggaataatctcattcaatttttcacgctaaatgaaagggagattaaatatttgtcagtttatgtcagtgcggaaaattaaaaataaaacacatagatcagatccataattgccaacaatccccagagaaaaagataaagcatcagatgctcgcgaatattattgatgagatagtgcaacagccgacgcattaaatactcctgtaaaaacggcctcattctggaggccgtaatgatgattattggaagcgggaaagcctgaatggcgtcaaatcaaaatcgctttttttgtcttgcgcaaaatcggcagctatttcccctaaaacactcgcaaatttaaaaccgtgcccactcaggccggtaatgagcagtgtattatcgtggccgggtagggtatcgataataaaatcttcgtcagggctattatcataggtgcaggcagcgccgtacaggcagcaaccgatacccggcaatacattgcgcaagaacgggaaggcttcactcccatcactggccacttccgcaaacggaacacgttcatccgcactatggataacctggcctccgttatgtttgccaatcttcaacgcgtcgttttctgccggaaaaccataatattgatcgccattgggcagttcaccggtaaacgccgggaatttattcttcacgctatagcggccatcggcctgataccaggcaaatactttgcgtacgggctggacaggcagctccgggagcaggtcttttacccatgttcccgcgcagacaatcgcttttttcgcctgatactcaccgtcagccgtttcaatagttacgccatcatcgtcatgacgaattgcggtgaccgggcagttgaacagttgcgcacagcccgcttccttcgccagttggatccaggttttaatcgccagttcgctgcgcaaaaaaccggaatcagtttcaaataagccgatgtagttgtccgggacgcgtatttccggccagcgggccataatcccttgcgcatcgagcttttcaacgttgagttgccattgttcggcgctgtgggcgacgttggcgagaaatgtggaatcagccgggccaaggttaatgacgccagagcgtacaaaaatgggatcttcttcgttgtggcgggagagttcatcccacagcgtttgcgcgcggaggaccagcgggacatacttttcgccttcaccataagcatggcgaattaatcgcgtatcgccgtggtggctgccgtgttgatgcggtggcatatgggcgtcggtcattagcacgtttaaaccggcgcgggttgcataatacccggcggcagcgcctacggaaccgctgccaataatgatgagatcgtatttcatttttttctctctgctctcatggtttaagcagagtaattaactgaatgcagatatacaacccagaaatggtaaaggcaccggtgaggtgccttttgggtggatggtcatgtcatgttaatgacgccgatactcgtttacctggaaatcaccggattcaattttggcgattcctgcttctaatatgctaataaattgtctggcaacatcagtggttaaccagagcgtctgaccaacttcagtcccttcctgctcggacttatttggggtctggtagtgcaaacgcaacatcagcgcatcatagctatcaacggtgctgatgtcccaccctacgagcggatgagtctgaatgacttcattatttttttccatcatggccccctaattcgtgttactagacaacgttattcgaggttcaatgcgtttttatctgaagcaacttcagtataccaataagtaagggtattcaccgaatttttaaagggggaaacagataaatttctgcttttaagatttatatgaacaataaaacagcatgtcattcatatttttttagcatattgtgcaattattttgaggaagtgtagaaattttgtactcaaaattcgtaagtaaaataaaaaagccggggcgacccggcaaaaaaaatcactgcatattattcgctgacaaaccagtcatcggcgctttcccacgtttcctggagaatttcactaatgcgctgtttatcttcttttgtcgcgccaataacgcttaaattattcgctgcggcataacgtacgcttacgtggccttcattatcaggaaacgcatactgaatacggcgggaaagttcgccagccagggcgtcaatagccccagctggcaatggagaagttttcgctatggtgacttcaattcgcataatagccccctgttgaatatactggttatttatacaggtaaaataacctaatgacaacaggaagctacgatttttattgtttaacggaccagcgtaccgtttccccggcgaggaatggcaccagcgtgtcatcagtcagtgcgatgctttcagcaacctgttgctcttcacgtaccagttcgatgaatgtgtcgttgaccggcaacccatagaactgcgggccgtttacagaacagaatgcttcaaagtgctgcaaagcattcatttcttcaaagacggtagcgtaactgcccagcgcggttggggcgttgaagcagcccgcgcagccgcaactgctctctttgcgatgacgtgcatgtggcgcagaatccgtaccgaggaatactcgattaaaaccgctggcgaccagttcacgcaatgcctgttggtgaatattacgtttgaggatgggtagacaatacaggtgcggacgcacgcctccaaccagcatatggttgcggttaaacatcagatgctgcggagtgatggtggcagccagccgttcatttccgtcacggacatagtcggcagcatctttggtggtgatgtgctcaaaaacgactttcagcgcagtcaggcgctggcgcagaggttccatcacgctttctataaagcgcgcttcacgatcaaaaatgtcgatatctgcatgtgtcacttcaccatgcaccagtagcggcataccgattttttccatgcgctcaagtaccggcatgattgcgtcaatactcgtcacgccgtggctggagttagtggttgcgtttgccgggtaaagttttgcagcggtgaacacgccttcgttaaatccgcgctccagctcattaggatccaggctatctgttaaataacaggtcatcaatggggtgaaatcgtgcccggcaggtacggcgtcaagaatacgctggcgatacgccacggcagcctcaacggtggtcacgggcggagccagattgggcattacgatagcccgtccataaatttcgctggtatatggcacgacagtttttaacatgtcgccatcgcggaggtgaaggtgccagtcgtctgggcggcggatctttaatacctgggatggtgcagtcattaatctctatgctccggctgaagggatgtttttgccggacacaaaggataagcggaaacgttttcctttgcacgaaaaataaagggcgcgaatgcgccctcgtgattaatcagtaaatggaatgacaatttcgcctggcttcacttcaatgcctttcgccagttttttcgccattgcttcgccctggctgccatcttcgcgcaggacgtaagcaggttgctggttaaagtaattgcgtaatgcctggttcaaatagggaagcaacgtttgcatcaccgtttgcattttttccggttgtaccgtcgcatcgaccacttccatctctttcaggaagatcgcacctttttctttatcaaacacgggcagcgctttcagcttcagtttcatggtcgctttctgactaccgaacagggagttcatgtccagattggcgtctccggttagggtaaccttattcggctcttcgcgaccaatttggctggtcaggtttgtcagaacaatatgggcgtcagccacgccgggtaaaccgatatctttactgaaattattatgtttcgcaaggctctggttaatttcttgttcggtgatggtgtattgggtgagttgattacagccaacgagcaggccactgacgatcaatgcagcggcaaataaaaacttgttcatggtagtcctcgacatgaaatctgcgtcaatatcctgacacaacgcagcatgtgtcaccagcgataaactcgccagcagaaaaaactgaaaacggcggcaacccgcgaatacaggctgccgcggcgggtcaggattaaatcgccatactacttaacaaattgatttgtgtctgtttcgccatattatcgcggtaatcagcaacgcggcttggccagttaattccggctaccagcgtcagattacgcagtagcgggaatagctgaatatcatcttcgctaagttcgccattcacggcgttcggtttgacgatcagtttgtccagcgcacgtaaatcatcgctgatattcttaatcagaccgtcagagtgggccagcaggtcggcaaaattacccgcgctggcctctttcttgtcgacgaaatatttgcgcgcggcgggagtagaaaactcatcaaatgcgcttttggcaaaacgcggcaacagcagtttgttggcgtagccattgaccttgcgcagccactcttcaatggcaggggaacgtttgccggtcagtaacggtttgccgtcgagtttatcgacatagtgaacgatgtccatgctttctggcatatagcggctgtcatctttttgcagaatgggaacctgtttttgaccgaccatccgggtgggtgtttctgcgtcgtcgttgagcagaacatgtaattcgacggggatatttttcaggccgaaaatcatgcgggctttgaggcagtaagggcagtgatcgtaaatgtatagcttcacgtgactcctccatttggctgtcagttcactttcagtatgaaggagtcaggggggagtatcaaatcaggcgtcgcgttcaagcaaacgacgcgcggcgcgtttctggctaaactgccaacccagcgcaaggaaagtgaagatgccaataatgcccagcatcatccacggaagctctggctggtgcgcgcttttgcccaggtcaaacagccagccgccaccgatataaccaatagcgccgccaatcgccagacccagacggctaaaccccatatagctgccgcgagctcttgcgtccgccaggctagcacttaaggtttcacgcgcaggctcggcaatgatgctcccgatataaaacagacaaatcagggtgaaaagttgttgcaggccgctgaccatgcccaccggcatcatgcttaaactcattatcaacagcccagccatcaaccggtgttccagacgaaaatgcttttcactccagcgggcgatagggtagagcaacgttaagctcagacacgcttcaatggcatacatccatttaacggcagagggcgcgcagccacgtcgttgaccataattggcagcatcagcatcacttgtacagccagcatgtagtaacccgccagcgtcagaacataggtgacaaaacgcttgtcacgcatcacgcgggtcatgccttcgcgaacgggcgtgcgtacggtggagagtttccatgctggtaacaaccacgcattgaacgccgcacatagcacaaatagaactgcccctgtggcgcagaccaggcgaaagtcgtattgcaacagccagctccccaacaatgcgccaatgaccgcaccggcactgtcctgcatcatcaacaggctgaaaaaacgaccacgctgctgtggacggattaatttcaccaccagcgcgctacgcggcggatcaaacaacgtgccaccgagtccgctgagcaggcaactaaaccacaatagccacggttcgtgggcgatacccattgtggcgaatccggcggcgcgcatcagcataccggtaacaatcatcggtttggcaccaaagcggtcggcaattgcaccgccgaaaatacccagaccttgctgaataaattggcgtagaccgagagcaataccgaccatgacggcggcccagcccatttgatcaacgaagcggatagagatcagcgggaagacaacaaagaaccccagcacgaccagcatattatcgatgagcaggaaatatttacccaggttcctcgcctggctcacgcgggacatttcccctcccgggaaataaaagatgagcactttctattctgcattgccgctaagacttttcccatcacttcggggacaatatttttttatcaaaacgtcgctttgatagagagtttttatcaaatatgtgaataatgcagaaaatggcattttggacttttcacagggtctggttgcgcaggtatagtaatacttacagcgtattaaagacgttacgggaaggagtaggtatagaatgtttggctatcgcagtaacgtgccaaaagtgcgcttaaccacagaccgactggtcgtgcgtctggtgcatgatcgtgatgcctggcgtcttgcggattattacgcagagaatcgccatttcctcaagccctgggagccagtgcgcgacgaaagccactgttatccaagtggctggcaggccaggctggggatgattaacgaatttcataaacaaggtagtgctttctactttggcttattcgacccggacgaaaaagagattattggcgttgccaatttttccaatgttgttcgtggctcttttcatgcctgctatctcggttatagcattgggcaaaaatggcagggcaaaggactcatgtttgaagccctgaccgcagccattcgttatatgcagcgcacccaacatattcatcgcattatggctaattatatgccgcacaataaacgcagcggtgatttactggcgcgactgggttttgaaaaagaaggctatgcgaaagactatctgttgattgatggacaatggcgcgatcacgtactgacggcattaactaccccagactggacgcccggccgctaaggagaatctcatgaaatatcaacttactgcccttgaagctcgcgtgattggttgcttgctggaaaagcaggtgaccacgccggagcaatacccgctcagtgtcaatggtgtagtcacggcctgtaatcagaaaacgaaccgtgaaccggtcatgaatctgagtgaatccgaagtgcaggaacagctggataatctggtcaaacgtcattatctacgcacagtgagcggttttggtaatcgggtcaccaaatatgagcaacgtttttgtaatagtgaatttggcgatctgaaactgagcgcagcggaagtggcgttaatcaccacgttgttattgcgtggtgcccagacgccaggtgaactgcgcagccgcgccgcgcgaatgtatgaattcagcgatatggcggaagtggagagcacgctggaacaactggcaaatcgcgaagatggtccttttgtggtgcgtctggcccgcgaaccgggtaaacgcgaaaaccgctacatgcatcttttcagtggtgaggttgaagatcagccggcggtgacggatatgagcaacgcggttgacggtgatttacaggcccgcgtcgaagccctggaaatcgaagtggcagaactgaaacagcgtcttgatagcttgctggcccatctgggagattaaagtgaaaaaattacgtatcggcgtagtgggattaggtggcattgcgcaaaaagcgtggttaccggtgctggcggcagcgtctgactggacgttacaaggagcctggagccctacgcgcgcgaaagccctgccaatttgtgaaagctggcgcattccttatgccgatagcttatccagccttgccgccagttgcgatgcggtttttgtgcattccagcaccgccagccactttgacgtggtcagtacgttactcaatgcgggggtacatgtctgtgtcgataaaccgctggcagaaaatctgcgcgatgctgaacggctggtggaactggcggcgcggaaaaaactgacgttgatggtcggttttaaccgtcgtttcgcaccactctacggtgagttaaaaacgcaactcgccaccgcagccagcctaagaatggataaacatcgtagcaatagcgtcgggccacacgatctttatttcacgttgctggatgattatctgcatgtggtggataccgcgctgtggttgagcggcggcaaagcctctctggatggcggtacgctactgactaacgacgctggcgaaatgctgtttgccgagcaccattttagcgctggtcctttgcagatcaccacctgtatgcatcgccgtgccggaagtcagcgtgaaaccgtgcaggccgtgactgacggtgcgctcatcgacattacggatatgcgcgaatggcgtgaggagcgcgggcagggcgtagtgcataaaccgattcctggttggcagagtacgcttgagcaacgtgggtttgtcggctgtgcgcggcacttcattgaatgtgtgcaaaaccagacagttccgcaaaccgccggcgaacaggccgtgctggcgcaacgtatcgttgacaagatctggcgcgatgcgatgagtgaataaaccctgtaacatctggcggtagcaattcaccataatccaggtagactattcgcctctttcagcgcctgccttgcaggcgttttgcccgtgggtctggattagaacaccgatgaatttattaaaaagcctggccgccgtcagcagcatgaccatgtttagccgtgtgcttggcttcgcacgagacgcaattgtcgccagaatctttggcgcagggatggcaaccgacgcctttttcgtcgcttttaaacttcctaacttgttacgccgtatctttgccgaaggggcattttcccaggcatttgtaccgattctggcggaatataaaagtaagcagggtgaagacgccacgcgggtctttgtctcttatgtttctggcctgctgacacttgcgctggcggttgtgacggtcgctggcatgctcgccgcaccgtgggtgatcatggtgaccgcgccaggcttcgctgacacagctgacaaatttgccctgaccagccagctactaaagattacctttccctatatcttgctgatctccctggcgagcctggtgggagcgattctgaatacgtggaaccgcttcagcattccggcgtttgctccaacactgcttaacatcagcatgattggtttcgcgctgtttgccgcaccgtactttaacccaccggtgctggcgctggcgtgggctgttacggtcggcggcgtcctgcagctggtgtatcagctaccgcacctgaagaagatcggcatgctggtcctgccgcgcattaacttccacgatgccggagcaatgcgcgtggtgaaacagatgggaccggcgatccttggcgtctctgtgagccagatctccttaatcatcaacaccatttttgccagctttcttgcttccggtagcgtgtcttggatgtattacgccgaccgcttaatggagtttccgtccggtgtgctgggcgtggcgcttggcaccattttgctgccgagcctgagcaaaagttttgccagtggcaatcatgatgaatacaaccgtttgatggactgggggttgcgtctttgtttcctgttggcgctgccgagtgcggttgcgttgggcattctttccggtccgttgaccgttagcctgttccagtacggtaaatttaccgcgtttgatgcgctgatgacccagcgggcgttaattgcctacagcgtgggtttgattggcctgattgtagtgaaagtgttggctcctggcttttattcccgccaggacattaaaacgccagtgaaaattgccatcgttacgctgattttaacgcaattgatgaacctggcgtttattggtccgttgaaacatgccgggctgagtctttctattggtctggcggcgtgtctgaatgctagcctgctttactggcagttgcgtaagcagaaaatctttaccccgcaacccggctggatggcgtttctgttgcgtctggtggtggcggtactggtgatgtctggcgtgcttttaggtatgttacatatcatgccggagtggagtttgggtaccatgccctggcgtttactgcgtttaatggcggtcgtgctggcggggattgccgcgtacttcgctgcactggcggtactgggcttcaaagttaaagaatttgcccgccggacggtgtaacaatgcattccggcctgcagtgttcgctttaaaacatatcatgaaactgggtatgttttgtctgcctgctctgggatcgctggggcgggcatttttttgcctattttgcattgttggttagcaaggatgccattcgatgaattttaatatgttgattcaaagatgaaataaaaaagccctggcagttaccagggcttgattactttgagctaattattactcaacaggttgcggacgcgcaggagcggcagaggcatgatgtgttgccgtatgaccacctgcggcacctttaccttcgaaggcaaaagtagggcgctgccagtcactgtgacgcggtgcctccggaacatattccggtgctggagcgcgcgtcattggcgcggtagcgtggttatgctcaacggtgacctcaggttcgaccgcagctaccgtttcaacttctgctgcgacttcagcgactactggcgcggcaggttgagcaacaacttcaggttcagcaactacaacctcagcagtttcgacaacttcttcaatatctgccgtctcttcctgcggttcaaccaccggttctgcttgttctgcaacttcctgggctacggcaacatcagactcggtaatcacctgcggctgttcagttaccgcggcagcgatcacttcaggatgcgtcgtttcaaccacttccggttgcggttcggcaacctgaacgggggcttctacgacaccggccacttcttcaacaactggcgcgctaacaaccggttcgatagcggcggcgacagggacctcagtcaccatcggctgcacatgtacttcttcctgttcgcgctgctcttcaacctgtacatcttgcggacgtacaattggatagcggatccagactttgccagaggccagttccggagacgcgcacgctacggtcaacggcattgggctctgggttggataacgctcgtcacgatagcgacgacgacgctgaccacttacgcgcaggtgacgagggctgcggcgagaacgacgcggcatgccaccgttgtcacggttatcagcattgttctcttcttgctgttctggtgcagtttgcgctacgactggcagcgggactttcaccagttctgtgcgtggagctggcgcttcctgaacaattggttcggcagcgacagtttcttcaaccaccggtgcgactaccgcttcttcggctacgctttgctcgtaacgcactttctgattgagctgacgctgtttacgacgcggctgaaccggacgtacacgttcttcctgttcggtttcctgaacagattgctcttcaacattcagcgccttcgcttcttgttgcgcctgacgtttatcatcattacggcggcggctacgttcacgacgcggcgcttgctgctcgtcggcggtacgcgctttttccgttacctcagcctgctgacggctctcacgcgtctcggcagtctgctgctgtgcctggcgacgattacgacggttttcttcgcgattatcgctgccttcagtacgttcactacgggtgtcgcggcgctcattacggtcacggcggttgttctgacgaggcttgcgacgatcctgttgacgttccggtttcgcttctgctttcggtgctggttgctcggtcggtttggtttcttcaccaccgctgaacagcgctttcagtgcgccgaagaagcggctcaacagcccaggttgtgcaggagctgctggtgttgccggtgcagctttcggtgctggagctacaacaggcgcggcaggttcagctggcgttggcgcaggcggcacatccggcatggcaaaggttgccagcgcaggttgttccggacgcttacgttcagcgaactcttcttcagacggcagcgccatcgcttcttcatgcagcttcggcagcatgtagcttaaggttggggtttcttcccctttacgcacgcgcagcacgtggtagtgcggggtttccatctgatcgtttggcacaattacacagcgcacaccgtcctgacgagtttcaatggcatttaccgcagaacgtttttcattcagcaggtaagaagcgattggcacaggaacaatggcgtgaacttcctgggtgttctctttcagcgcttcttcttcgatcagacgcagaatagagaggctcaggctttcgttgtcacgcacggtgccagtaccagaacaacgcggacaaacgtgatgactggattcacccagacttgggctcaggcgctgacgggacatttccagcaggccaaagcgagaaatatggctgatttgaatacgcgcacggtcctgacgcaccgcttcacgcagacggttttctaccgcacgctggtggcgtactggcgtcatgtcgatgaagtcgataacaatcaggccgccgaggtcacgcaggcgcagctgacgagcaatctcatcggcagcttcgaggttagtgttaaacgcggtttcttcgatatcgccgccgcgggtcgcgcgtgcggagttgatgtcgatggccgttaacgcttcggtgctgtcgataacaatggaaccaccagacggcagacgaacttcacgctggaaggcggactcgatctgactctcgatctggtagtggctgaacagcgggatctcgccggtgtacagtttgattttgctgctgaaatccgggcgacctaatgcagcgatatgctgacgtgccagttcgagcactttcgggttatcgataaggatttcgccgatgtcctgacgtaagtaatcgcggaatgcgcgaacgattacgttgctctcctgatgaatcaggaacggggccgggcggctttcagcggcttttttgatggcttcccagtgtttcagacggaagcttaaatcccattgcagcgcctcagcagatttgccgacgccagcggtgcgcacgataagccccatgccttccggcagttcaaggcttgccagtgcttcttttaattcggtacggtcgtcgccttcgatacggcgagaaatgccacccgcgcgcgggttgttcggcatcagaaccagatagctacccgccagactgataaaggtggttaatgccgcgcctttgttgccgcgctcttctttatcgatctgaacaatgacttcctgaccttcacgcaacacatctttaatgttgggacgaccatgagcactgtagttagcagggaaatattcgcgggcaatttcttttagtgggaggaaaccgtgacgttcagcgccgtaatcaacaaaagcagcttccagactcggttcaatgcgggtgattttacctttgtagatgtttgcctttttctgctcgtgccctggactttcgatatccaggtcatacagacgctgcccatctacaagggcaacgcgcaactcttcctgctgagttgcgttgattaacattcttttcatcgtaacttactcattattcttacattgacgactaagctgcgggcaaagtaacgcctttccgggtgtgaaccgatggcctcgtgtctagtcgcgtcgccaacctcacggttatcgtcagctcaaagaggcgcagagtgtgagttgcccgtttttcatgcggaaaaacagcgcaattatcaaagaaacagactgggtattactctccagaaatatttccatctaccggtaaggactgcaacccgcagcccgctaactgcctgaaagatcaatacgtcttacgccattgctgcgtggatgatcggtcgggcaaaatgggttattccgtaaaatttcttgttttaacaaggatggacacggaaacggcctcattattccactgcaagccttgttatagcaagatgacttttaccatttatcacccgcttactcacagttttttcacttcttgctggtgattggtttaataaccatcaataaagtgatcacgcagtgaagtaataaggtgcaaaagtaaatataagcatagaaaaatgagtggcgcgaatcctgttggctaattagaatcgccaaccatgaaaacagagactccatccgtaaaaattgttgctatcaccgctgacgaagcggggcaacgtatcgataactttttgcgtacccaattgaaaggcgtaccaaaaagtatgatttaccgtattttgcgtaaaggcgaagtgcgggtgaacaaaaaacgtattaagcctgaatataaactcgaagcgggtgatgaggtgcgtattccaccggttcgcgttgctgagcgggaagaagaggcggttagcccacatctgcaaaaggtggcggcgctggcggacgtcatcttatatgaagatgatcacatcctggtgctgaataaaccttccggtacggcggtacatggcggcagtggtttaagcttcggcgttattgaaggtttgcgggcgttgcgcccggaagcgcggttccttgaactggttcatcgtcttgaccgggacaccagtggtgttttgctggtagcgaaaaaacgcagcgcgttgcgttctctgcatgagcaattacgtgaaaaagggatgcaaaaagattacctggcgctggtgcgcggtcagtggcagagccatgtgaagagcgttcaagcaccgttactgaaaaatattctgcaaagcggcgaacgtatcgtgcgtgtgagtcaggaaggcaaaccgagcgaaacacgctttaaagtggaagaacgctatgcatttgccaccctggtgcgttgtagcccggtaacagggcgtactcaccagatccgtgtgcatacacaatatgcgggtcatccgattgcctttgacgatcgctacggtgaccgtgaatttgacaggcagctcactgaagcaggcacgggattaaatcgcctgttcctgcacgctgcagcgttgaagtttactcatccggggaccggtgaggtgatgcgtatcgaagctccgatggatgaaggtttgaagcgttgtttgcaaaagctgcgtaacgcgcgctaatacaagcatataaacctgataatgggcggttggcctgataaggcgtttacgccgcatcaggccgccagcaccgattgccggatgcgacgtaaccacatccggcgcaaaaaattatcccatcagcgggtttttcccttcccgacgtaacatctgacacagcgcgattagcggtaaaccaaccagcgtgttaggatcacgcccctctaaacgctcaaacagcgtaatgccaaatccttcactcttaaagctacccgcgcagtgcaggggatgctctttacgcacgtaattatcaatctccgcctcgctcaggtgacggaaatggacgtcaaaaggctccacttctgtttgcagatgcccattcgcgctattaaacaacgccagtccagtatagaaggtgacgatattgccgctggctttgcgtaattgcagacgggcattttcttccgttaacggtttaccggtgatttcgccatcaagaacacatacctggtcactaccaataattaaatgatccggataacgactcgccagagattgcgctttttcttgtgccagtcgaagcaccaactgtcgcggactttcgtcgctgcgtggggtttcgtcgacctctggtgctgcacattcaaaagagatttgcagtttttccagaagagcgcgacgccatgggctggtggaggctaaaataagtttaggcatatttttttccatcagatatagcgtattgatgatagccattttaaactatgcgcttcgttttgcaggttgatgtttgttatcagcactgaacgaaaataaagcagtaacccgcaatgtgtgcgaattattggcaaaaggcaaccacaggctgcctttttctttgactctatgacgttacaaagttaatatgcgcgccctatgcaaaaggtaaaattacccctgactctcgatccggttcgtacggctcaaaaacgccttgattaccagggtatctatacccctgatcaggttgagcgcgtcgccgaatccgtagtcagtgtggacagtgatgtggaatgctccatgagcttcgctatcgataaccaacgtctcgcagtgttaaacggcgatgcgaaggtgacggtaacgctcgagtgtcagcgttgcgggaagccgtttactcatcaggtctacacaacgtattgttttagtcctgtgcgtagtgacgaacaggctgaagcactgccggaagcgtatgaaccgattgaggttaacgaattcggtgaaatcgatctgcttgcaatggttgaagatgaaatcatcctcgccttgccggtagttccggtgcatgattctgaacactgtgaagtgtccgaagcggacatggtctttggtgaactgcctgaagaagcgcaaaagccaaacccatttgccgtattagccagcttaaagcgtaagtaattggtgctccccgttggatcggggataaaccgtaattgaggagtaaggtccatggccgtacaacagaataaaccaacccgttccaaacgtggcatgcgtcgttcccatgacgcgctgaccgcagtcaccagcctgtctgtagacaaaacttctggtgaaaaacacctgcgtcaccacatcactgccgacggttactaccgcggccgcaaggtcatcgctaagtaatcacgcatctgcgtgatgaagcttagtgaggattttccccaggcaactggggaaagaccaaaccgggcggcgacgataccttgacacgtctaaccctggcgttagatgtcatgggaggggattttggcccttccgtgacagtgcctgcagcattgcaggcactgaattctaatagccaactcactcttcttttagtcggcaattccgacgccatcacgccattacttgctaaagctgactttgaacaacgtagccgtctgcagattattcctgcgcagagtgttatcgccagtgatgcccggcctagccaagctatccgcgccagtcgtgggagtagtatgcgcgtggccctggagctggtgaaagaaggtcgagcgcaagcctgtgtcagtgccggtaataccggggcgctgatggggctggcaaaattattactcaagcccctggaggggattgagcgtccggcgctggtgacggtattaccacatcagcaaaagggcaaaacggtggtccttgacttaggggccaacgtcgattgtgacagcacaatgctggtgcaatttgccattatgggcagtgttctggctgaagaggtggtggaaattcccaatcctcgcgtggcgttgctcaatattggtgaagaagaagtaaagggtctcgacagtattcgggatgccagtgcggtgcttaaaacaatcccttctatcaattatatcggctatcttgaagccaatgagttgttaactggcaagacagatgtgctggtttgtgacggctttacaggaaatgtcacattaaagacgatggaaggtgttgtcaggatgttcctttctctgctgaaatctcagggtgaagggaaaaaacggagctggtggctactgttattaaagcgttggctacaaaagagcctgacgaggcgattcagtcacctcaaccccgaccagtataacggcgcctgtctgttaggattgcgcggcacggtgataaaaagtcatggtgcagccaatcagcgagcttttgcggtcgcgattgaacaggcagtgcaggcggtgcagcgacaagttcctcagcgaattgccgctcgcctggaatctgtatacccagctggttttgagctgctggacggtggcaaaagcggaactctgcggtaacaggacgctgccagcgaactcgcagtttgcaagtgacggtatataaccgaaaagtgactgagcgtacatgtatacgaagattattggtactggcagctatctgcccgaacaagtgcggacaaacgccgatttggaaaaaatggtggacacctctgacgagtggattgtcactcgtaccggtatccgcgaacgccacattgccgcgccaaacgaaaccgttagtaccatgggctttgaagcggcgacacgcgcaattgagatggcgggcattgagaaagaccagattggcctgatcgttgtggcaacgacttctgctacgcacgctttcccgagcgcagcttgtcagattcaaagcatgttgggcattaaaggttgcccggcatttgacgttgcagcagcctgcgcaggtttcacctatgcattaagcgtagccgatcaatacgtgaaatctggggcggtgaagtatgctctggtcgtcggttccgatgtactggcgcgcacctgcgatccaaccgatcgtgggactattattatttttggcgatggcgcgggcgctgcggtgctggctgcctctgaagagccgggaatcatttccacccatctgcatgccgacggtagttatggtgaattgctgacgctgccaaacgccgaccgcgtgaatccagagaatagtattcatctgacgatggcgggcaacgaagtcttcaaggttgcggtaacggaactggcgcacatcgttgatgagacgctggcggcgaataatcttgaccgttctcaactggactggctggttccgcatcaggctaacctgcgtattatcagtgcaacggcgaaaaaactcggtatgtctatggataatgtcgtggtgacgctggatcgccacggtaatacctctgcggcctctgtcccgtgcgcgctggatgaagctgtacgcgacgggcgcattaagccggggcagttggttctgcttgaagcctttggcggtggattcacctggggctccgcgctggttcgtttctaagataaggattaaaacatgacgcaatttgcatttgtgttccctggacagggttctcaaaccgttggaatgctggctgatatggcggcgagctatccaattgtcgaagaaacgtttgctgaagcttctgcggcgctgggctacgacctgtgggcgctgacccagcaggggccagctgaagaactgaataaaacctggcaaactcagcctgcgctgttgactgcatctgttgcgctgtatcgcgtatggcagcagcagggcggtaaagcaccggcaatgatggccggtcacagcctgggggaatactccgcgctggtttgcgctggtgtgattgatttcgctgatgcggtgcgtctggttgagatgcgcggcaagttcatgcaagaagccgtaccggaaggcacgggcgctatggcggcaatcatcggtctggatgatgcgtctattgcgaaagcgtgtgaagaagctgcagaaggtcaggtcgtttctccggtaaactttaactctccgggacaggtggttattgccggtcataaagaagcggttgagcgtgctggcgctgcctgtaaagcggcgggcgcaaaacgcgcgctgccgttaccagtgagcgtaccgtctcactgtgcgctgatgaaaccagcagccgacaaactggcagtagaattagcgaaaatcacctttaacgcaccaacagttcctgttgtgaataacgttgatgtgaaatgcgaaaccaatggtgatgccatccgtgacgcactggtacgtcagttgtataacccggttcagtggacgaagtctgttgagtacatggcagcgcaaggcgtagaacatctctatgaagtcggcccgggcaaagtgcttactggcctgacgaaacgcattgtcgacaccctgaccgccagcgcgctgaacgaacctagtgcgatggcagcggcgctcgagctttaaaagaggaaaatcatgaattttgaaggaaaaatcgcactggtaaccggtgcaagccgcggaattggccgcgcaattgctgaaacgctcgcagcccgtggcgcgaaagttattggcactgcgaccagtgaaaatggcgctcaggcgatcagtgattatttaggtgccaacggcaaaggtctgatgttgaatgtgaccgacccggcatctatcgaatctgttctggaaaaaattcgcgcagaatttggtgaagtggatatcctggtcaataatgccggtatcactcgtgataacctgttaatgcgaatgaaagatgaagagtggaacgatattatcgaaaccaaccttagttctgttttccgtctgagtaaagcggtaatgcgcgctatgatgaaaaagcgtcatggtcgtattatcactatcggttctgtggttggtaccatgggaaatggcggtcaggccaactacgctgcggcgaaagcgggcttgatcggcttcagtaaaagtctggcgcgcgaagttgcgagtcgcggtattactgtaaacgttgttgctccgggctttattgaaacggacatgacacgtgcgctgagcgatgaccagcgtgcgggtatcctggcgcaggttcctgcgggtcgcctcggcggcgcacaggaaatcgccaacgcggttgcattcctggcatccgacgaagcagcttacatcacgggtgaaactttgcatgtgaacggcgggatgtacatggtctgaccgcgatttgcacaaaatgctcatgttgcgcgcagtctgcgtggttatgagtaataattagtgcaaaatgatttgcgttattggggggtaaggcctcaaaataacgtaaaatcgtggtaagacctgccgggatttagttgcaaatttttcaacattttatacactacgaaaaccatcgcgaaagcgagttttgataggaaatttaagagtatgagcactatcgaagaacgcgttaagaaaattatcggcgaacagctgggcgttaagcaggaagaagttaccaacaatgcttctttcgttgaagacctgggcgcggattctcttgacaccgttgagctggtaatggctctggaagaagagtttgatactgagattccggacgaagaagctgagaaaatcaccaccgttcaggctgccattgattacatcaacggccaccaggcgtaagtgaacatctccaggcggtcgttcgaccgcctgagttttatctttttgtcccactagaatcattttttccctccctggaggacaaacgtgtctaagcgtcgtgtagttgtgaccggactgggcatgttgtctcctgtcggcaataccgtagagtctacctggaaagctctgcttgccggtcagagtggcatcagcctaatcgaccatttcgatactagcgcctatgcaacgaaatttgctggcttagtaaaggattttaactgtgaggacattatcagccgcaaagaacagcgcaagatggatgccttcattcaatatggaattgtcgctggcgttcaggccatgcaggattctggccttgaaataacggaagagaacgcaacccgcattggtgccgcaattggctccgggattggcggcctcggactgatcgaagaaaaccacacatctctgatgaacggtggtccacgtaagatcagtccattcttcgttccgagtacgattgtgaacatggtggcaggtcatctgactatcatgtatggcctgcgtggcccgagcatctctatcgcgactgcctgtacttccggcgtgcacaacattggccatgctgcgcgtattatcgcgtatggcgatgctgacgtgatggttgcaggtggcgcagagaaagccagtacgccgctgggcgttggtggttttggcgcggcacgtgcattatctacccgcaatgataacccgcaagcggcgagccgcccgtgggataaagagcgtgatggtttcgtactgggcgatggtgccggtatgctggtacttgaagagtacgaacacgcgaaaaaacgcggtgcgaaaatttacgctgaactcgtcggctttggtatgagcagcgatgcttatcatatgacgagtccgccagaaaatggcgcaggcgcagctctggcgatggcaaatgctctgcgtgatgcaggcattgaagcgagtcagattggctacgttaacgcgcacggtacttctacgccggctggcgataaagctgaagcgcaggcggtgaaaaccatcttcggtgaagctgcaagccgtgtgttggtaagctccacgaaatctatgaccggtcacctgttaggtgcggcgggtgcagtagaatctatctactccatcctggcgctgcgcgatcaggctgttccgccaaccatcaacctggataacccggatgaaggttgcgatctggatttcgtaccgcacgaagcgcgtcaggttagcggaatggaatacactctgtgtaactccttcggcttcggtggcactaatggttctttgatctttaaaaagatctaagttgtcattttccacccttataaaaggtccgcttgcgggccttttttcttagcttttattccgacttgttccgtagtgaacatgctgccacactaacaattctctgataaggagccggtatgttcttaattaacggtcataagcaggaaagcctggcagtaagcgatcgggcaacgcagtttggtgatggttgttttaccaccgccagagttatcgacggtaaagtcagtttgttaagcgcgcatatccagcgactacaggatgcttgtcagcggttgatgatttcctgtgacttctggcctcagcttgaacaagagatgaaaacgctggcagcagaacagcaaaatggtgtgctgaaagtcgtgatcagtcgcggtagtggcgggcgagggtacagcacattgaacagcggaccggcaacgcggattctctccgttacggcttatcctgcacattacgaccgtttgcgtaacgaggggattacgttggcgctaagcccggtgcggctggggcgcaatcctcatcttgcaggtattaaacatctcaatcgtcttgagcaagtattgattcgctctcatcttgagcagacaaacgctgatgaggcgctggtccttgacagcgaagggtgggttacggaatgctgtgcggctaatttgttctggcggaagggcaacgtagtttatacgccgcgactggatcaggcaggtgttaacggcattatgcgacaattctgtatccgtttgctggcacaatcctcttatcagcttgtcgaagtgcaagcctctctggaagagagcttgcaggcagatgagatggttatttgtaatgcgttaatgccagtgatgcccgtatgtgcctgtggcgatgtctcctttagcagtgcaacgttatatgaatatttagccccactttgtgagcgcccgaattaatcatgaaaaaagtgttattgataatcttgttattgctggtggtactgggtatcgccgctggtgtgggcgtctggaaggttcgccatcttgccgacagcaaattgcttatcaaagaagagacgatatttaccctgaagccagggaccggacgtctggcgctcggtgaacagctttatgccgataagatcatcaatcgtccacgggtttttcaatggctgctgcgtatcgaaccggatctttctcactttaaagccgggacttaccgctttacaccgcagatgaccgtgcgcgagatgctgaaattgctggaaagcggtaaagaagcacagttccctctgcgactggtagaagggatgcgtctgagcgattacctcaagcaattgcgtgaggccccgtatatcaagcatacgctgagcgatgataagtacgccaccgtagcgcaggcacttgaactggaaaacccggagtggattgaaggttggttctggccagacacctggatgtataccgccaataccaccgatgtcgcgttactcaagcgagcgcacaagaaaatggtgaaagcggtcgatagcgcctgggaagggcgtgcggacggtctgccttataaagataaaaaccagttggtgacgatggcaagtattatcgaaaaagaaaccgccgttgccagtgaacgcgataaggttgccagtgtatttatcaaccgtttacgcattggtatgcgcctgcagaccgacccgaccgtgatttacgggatgggagagcgttataatggcaaactttctcgtgcagacctggaaacgccgacagcgtataacacctataccattaccggtctgccgccaggtgcgatagcgacgccgggggcggatagcctgaaggctgctgcgcatccggcaaaaacgccgtatctctattttgtggccgatggtaaaggtggtcacacgtttaataccaatcttgccagtcataacaagtctgtgcaggattatctgaaagtgcttaaggaaaaaaatgcgcagtaagtatatcgtcattgaggggctggaaggcgcaggcaaaactaccgcgcgtaatgtggtggttgagacgctcgagcaactgggtatccgcgacatggttttcactcgggaacctggcggtacgcaacttgccgaaaagttaagaagcctggtgctggatatcaaaagcgtaggcgatgaagtcattaccgataaagccgaagttctgatgttttatgccgcgcgcgttcaactggtagaaacggtcatcaaaccagctctggctaacggcacctgggtgattggcgatcgccacgatctctccactcaggcgtatcagggcggcggacgtggtattgaccaacatatgctggcaacactgcgtgatgctgttctcggggattttcgccccgacttaacgctctatctcgatgttaccccggaagttggcttaaaacgcgcgcgtgcgcgcggcgagctggatcgtattgagcaagaatctttcgatttctttaatcgcacccgcgcccgctatctggaactggcagcacaagataaaagcattcataccattgatgccacccagccgctggaggccgtgatggatgcaatccgcactaccgtgacccactgggtgaaggagttggacgcatgagatggtatccatggttacgacctgatttcgaaaaactggtagccagctatcaggccggaagaggtcaccatgcgctactcattcaggcgttaccgggcatgggcgatgatgctttaatctacgccctgagccgttatttactctgccaacaaccgcagggccacaaaagttgcggtcactgtcgtggatgtcagttgatgcaggctggcacgcatcccgattactacaccctggctcccgaaaaaggaaaaaatacgctgggcgttgatgcggtacgtgaggtcaccgaaaagctgaatgagcacgcacgcttaggtggtgcgaaagtcgtttgggtaaccgatgctgccttactaaccgacgccgcggctaacgcattgctgaaaacgcttgaagagccaccagcagaaacttggtttttcctggctacccgcgagcctgaacgtttactggcaacattacgtagtcgttgtcggttacattaccttgcgccgccgccggaacagtacgccgtgacctggcttagtcgcgaagtgacaatgagtcaggatgcattacttgccgcattgcgcttaagcgccggtagccctggcgcggcactggcgttgtttcagggagataactggcaggctcgtgaaacattgtgtcaggcgttggcatatagcgtgccaagcggcgactggtatagcctgctagcggcccttaatcatgaacaagctccggcgcgtttacactggctggcaacgttgctgatggatgcgctaaaacgccatcatggtgctgcgcaggtgaccaatgttgatgtgccgggcctggtcgccgaactggcaaaccatctttctcccagccgcctgcaggctatactgggggatgtttgccacattcgtgaacagttaatgtctgttacaggcatcaaccgcgagcttctcatcaccgatcttttactgcgtattgagcattacctgcaaccgggcgttgtgctaccggttcctcatctttaagagagacatcatgtttttagtcgacagtcactgccatctcgatggtctggattatgaatctttgcataaggacgtggatgacgttctggcgaaagccgccgcacgcgatgtgaaattttgtctggcagtcgccacaacattaccgggttatttacatatgcgggatctggtaggcgaacgtgacaacgtcgtattttcttgtggcgtgcatccactcaaccagaatgatccctacgatgtagaagatttacgccgtctggcggcagaagagggtgttgtagcgctgggtgaaaccgggctggattattattacacgccggaaactaaagtacgtcagcaagagtccttcatccatcatatccagattggtcgtgaactgaacaagccggttatcgtccatacccgtgacgcccgtgccgatacgctggcaattctgcgcgaagaaaaagtgacggattgcggtggcgtactacactgttttacagaggacagagaaacggcgggtaaattactggatctcggattttacatctccttttccggcattgtgaccttccgtaatgcggagcaactgcgcgatgctgcgcgttatgtccccctggatcggttactggtggaaactgacagtccttaccttgcgccggtaccgcatcgaggaaaagagaatcaacctgcgatggttcgtgacgttgcagaatacatggctgtgttgaaaggtgttgccgttgaagaactggcgcaggtaaccaccgataacttcgcccgtctgtttcacatcgacgcttcccgccttcaatccatccgttgaatgagtttttttaaagctcgtaattaatggctaaaacgagtaaagttcaccgccgaaaattgggcggtgaataaccacgtttgaaatattgtgacatatgttttgtcaaaatgtgcaacttctccaatgatctgaagttgaaacgtgatagccgtcaaacaaattggcactgaattattttactctgtgtaataaataaagggcgcttagatgccctgtacacggcgaggctctccccccttgccacgcgtgagaacgtaaaaaaagcacccatactcaggagcactctcaattatgtttaagaatgcatttgctaacctgcaaaaggtcggtaaaagcctgatgctgccggtatccgtactgcctatcgcaggtattctgctgggcgtcggttccgcgaatttcagctggctgcccgccgttgtaagccatgttatggcagaagcaggcggttccgtctttgcaaacatgccactgatttttgcgatcggtgtcgccctcggctttaccaataacgatggcgtatccgcgctggccgcagttgttgcctatggcatcatggttaaaaccatggccgtggttgcgccactggtactgcatttacctgctgaagaaatcgcctctaaacacctggcggatactggcgtactcggagggattatctccggtgcgatcgcagcgtacatgtttaaccgtttctaccgtattaagctgcctgagtatcttggcttctttgccggtaaacgctttgtgccgatcatttctggcctggctgccatctttactggcgttgtgctgtccttcatttggccgccgattggttctgcaatccagaccttctctcagtgggctgcttaccagaacccggtagttgcgtttggcatttacggtttcatcgaacgttgcctggtaccgtttggtctgcaccacatctggaacgtacctttccagatgcagattggtgaatacaccaacgcagcaggtcaggttttccacggcgacattccgcgttatatggcgggtgacccgactgcgggtaaactgtctggtggcttcctgttcaaaatgtacggtctgccagctgccgcaattgctatctggcactctgctaaaccagaaaaccgcgcgaaagtgggcggtattatgatctccgcggcgctgaccagcttcctgaccggtatcaccgagccgatcgagttctccttcatgttcgttgcgccgatcctgtacatcatccacgcgattctggcaggcctggcattcccaatctgtattcttctggggatgcgtgacggtacgagcttcagccacggtctgatcgacttcatcgttctgtctggtaacagcagcaaactgtggctgttcccgatcgtcggtatcggttatgcgattgtttactacaccatcttccgcgtgctgattaaagcactggatctgaaaacgccgggtcgtgaagacgcgactgaagatgcaaaagcgacaggtaccagcgaaatggcaccggctctggttgctgcatttggtggtaaagaaaacattactaacctcgacgcatgtattacccgtctgcgcgtcagcgttgctgatgtgtctaaagtggatcaggccggcctgaagaaactgggcgcagcgggcgtagtggttgctggttctggtgttcaggcgattttcggtactaaatccgataacctgaaaaccgagatggatgagtacatccgtaaccactaatccgtaagacgttggggagactaaggcagccagatggctgccttttttacaggtgttattcagaattgatacgtgccggtaatgctgaaattacgcggtgtgccgtagacgatagaaccttccacgttggtatcgtaggttttgtcgaacaggttattgacgttcccctgtaagctgaagtttttcgtcacctggtagcgggtgaagagatccaccagcgcgtagctaccttgctcggcgcggaaggtgccatacggcgtcacggtgtcggtatacacgcgattttgccagttaacaccaccgccgaccgtcaactctggcatgacaggcaaccgatagctggtgaacattttaaccgtggtgcgtggcagattaggattaacggcgtttccttcgttatcctctgcaatatagcgcgttgcgccaaatgtcagctgccagttgtcggtaattgcgccgttgagttcaaattccacccctttactgactgtcccatccaccgctttataggcggtttcgccgttgctgccggggataggtgtaccggtggactgagcgacattatcctgctcaatacggaagatggctaacgtggtggtcagacggctattcatccagtcgcttttcagacccagctcgtagttgttaccggtgattggagccagatatttgccactactgtcacgatcattttgcggctggaaaatagaggtatagctggcgtaggtgctccagttgtcattgatgtcaaacaccagaccagcgtaaggcgtggtgtggtttttctccatgctgtaagtcagcgtatcaacccgccagttggtataacgtgcgccgaggatcagatgcagcggatcggcaagggtgacacgagtggcagcatataagcttttcatatgtgtggtatcgtcctgcgccaggctctgtggactccagtcggtttgtgggaaattgccattaaagttgtagaaactgccaatttcatccgggaagatgttggcccaactactgaagtaacgattgttttgtttgctgtaactgccaccaaacattagattgtgctgacgaccaaacaattcataactaccgtcagcgaacaaatccagcgcatcaactttacgtttgccactgttccaaccggtgccgccgacataatcaaagccaggtccataattactgtatggcccaaccagcataccatccgctttgtttacataggcatcgacatacatcattttgctgtcaaattcgacttcagagtgggtggcattcagtgtcgcttgccaggtatcagcaaactgctgcttcagggtcataaagaccttgttgatctctttatcgttgtacgcccagtcaggtgcggtactgcgtgcgcgatcgtaactgttgctgctgccatcagtattccagcgcggtaaaccgccccaggtagggctattaacatcaatgcgctgatattcgtaaccggcactaagcgtcgtaagatcgcctaaatcagcatcgacaatgccgctgaagaaggtcttttcactgttgtagcggtccagccaactgtcgttattctggtagccgccgacaattcgcgcgcggattttaccgtcttcggtgagtgggctttgtaaatccgccacataccgttctttgttccagctaccgtattccgcgctgacatcgcctttaaattcacgactggtcgcgtgttttcgaaccatattaattgccgcagatggattacccgtcccggtcatgagtcctgtcgcgccacgcactacttctacgcgttcaaagagtgccatatcagaaagtgcgtcgcccagattccagcggctttcaaaataggtggggataccatcaaccatatagttatcgatctggaatccgcgggaataataaagagcacgatcggaatccgcctgacttttgctgatccccagcgtgttttccatcacttcgcccagcgtttgtaactgctgatcttccatccgctgctggctaacaatagtgacgctctgaggaatatcacgttgagtcatctgcattttggtacccgcagaggtagacgttacgctgtaatcattttcgccatcatctggagctgtggcactaccctcaacaatcaccgtttcttcagtggctggtgcagcaaaagcggcagaaggtaatagtgccagtgctatgcaaccggcaagtagactcggtttggtgatggcttgatattgattatccctgttaaattgtgtactaagcatttgaaatctcttggtttatgttgtcgtcaggctcatgccggaggagggtgatgagcgattatatttagtgtgcgaataattttgtttgtaaatgcaaatgagaaatatacgcattcatatttgtcatgtaaaccaaacagagaatgtcttttcagcgcattcgcaggcagaaatgggaataatggcgatatatacggcagcaaaacgattttttgcttaagaaatcgtgagttaaggttgaaagagcaggtttaactcgaccatactctatactcgcagtgtggcgcggcgtagcatggcgcaacgcatggctatttgaaaaaggaaaatgtcgtggcagaagaaactatattcagcaaaattattcgtcgtgagatcccctccgatatcgtctaccaggatgatctggtaacggcgtttcgcgatattagcccgcaagcgccaacgcatattctgatcattccgaatatcctcattccgactgtgaacgacgtcagtgctgagcatgagcaggcgctgggacgcatgatcaccgtagcggcaaaaattgctgagcaagaaggtattgccgaagatggctatcgtctgatcatgaataccaaccgccatggcggacaagaggtttaccacatccatatgcacttgttgggtggccgtccgctgggaccaatgctggcgcataaaggtctgtaacgatgagaaaaggatgctttgggctggtgtctctggtgttgttactgctggtgggctgtcgtagtcatccggaaattccggtgaatgatgagcaaagcctggtgatggagagttctttattggctgcgggcatcagtgcagaaaagcccttccttagcacgtctgatattcaacctagtgcatccagtacgctttataacgaaaggcaagaacccgttaccgttcattatcgtttttactggtatgacgccagagggctggagatgcatcctctggaaaggccacgcagcgttaccattcccgcacatagcgcggtaacgctgtacggcagcgccaattttctgggggcgcacaaagtcagactttatctatatttgtaaggggtgaatcttgatgacaaaaatgagtcgctacgccttgattaccgcgctggcgatgtttctcgccgggtgtgtggggcaacgtgaacctgcaccggtagaagaagtgaaaccagcgccggaacaaccagccgagccacaacagcctgtccccacagtgcccagcgtgccgacgatcccgcagcagccaggcccaattgagcacgaagatcaaactgcaccgcctgcgccgcatattcgccattatgactggaatggcacaatgcagccgatggtcagtaagatgcttggggctgacggggtgactgcgggtagcgtcctgctggttgatagcgttaacaaccgtactaacggtagcctgaatgccgcagaagcgaccgaaacgctgcgaaatgcgctggctaataacgggaaatttaccctggtttccgcccagcaactgagcatggcgaagcaacagttaggtttgagcccgcaggacagtttaggcacccgtagtaaagccataggcattgcccgcaatgtcggcgctcattacgtgctgtactccagcgcctctggcaacgttaacgctccgaccctacaaatgcagctgatgctggtgcagacgggcgaaattatctggagtggtaaaggtgccgttagccagcaataagtaaaattatctggtcaggtaaaggtgccgtttcgcagcaataatcccatcacgcgcgacgaattgctgagccgctttttcccgcagtatcatcccgtcacgacgtttaatagtgggcttagtggcgggagttttctcattgaacatcagggccagcgttttgttgtgcgtcagccgcacgatcctgatgcgccgcagtccgcgttcttgcgccagtatcgggctttaagtcaactacccgcatgcattgcaccgaagccgcatttatatctccgtgactggatggtagtcgactatctgcccggcgcggtaaaaacgtatttgccggataccaacgaactggcaggcttgctgtattatctacatcaacaaccacgttttggctggcgaataacgctgttgccgttactggaactgtactggcagcaaagcgatccggcgcggcggacagtgggttggctgcgaatgttaaaacgtctgcgcaaagcgcgggaaccacggcctttacgcttaagtccattgcatatggatgtccacgccggaaatttagtgcatagcgcgagtgggttaaaactcatcgactgggagtatgccggagatggtgatatcgcgctggaactggcggcggtgtgggtggaaaatactgaacagcaccggcaattggtcaatgactatgccactcgcgcgaagatttatccggcgcaattatggcgtcaggtcaggcgatggtttccctggctgctgatgctcaaagcagggtggtttgagtaccgctggcgacaaaccggcgatcaacaatttatcaggctggccgatgacacctggcggcagctattaataaaacaataaggagagcagtgtgggtccagtaatgttggatgtcgaaggttacgaactggacgcggaagagcgtgaaatactggcgcatccgctggtgggagggctgattctctttacgcgtaactatcatgatcctgcccagttacgtgaactggtgcgccagatccgcgcagctagccgcaatcgtctggtggtggcggttgatcaggaaggtggacgcgtgcagcgttttcgtgaaggttttacccgcttgccagcggcgcaaagtttcgctgcgctgagtggaatggaagagggtggcaaactggcgcaggaggcaggttggttgatggccagcgaaatgatcgctatggatattgatatcagctttgcgcctgtgctggatgtcgggcatatcagcgcggcgattggcgagcgttcttatcatgccgatccacaaaaagccctggcaattgccagccggtttattgatggtatgcatgaagccggaatgaaaacgaccgggaaacacttcccaggacacggtgcagtaacggcagacagtcacaaagaaacaccgtgcgatccacgtccacaagcggagattcgcgctaaagatatgagcgtcttcagttccttaatccgcgaaaataaactcgacgccattatgcctgcgcatgtgatctacagtgatgttgatccgcgtccggcgagcggttctccctactggctgaaaaccgttttgcgtcaggaactgggttttgacggcgtgattttctctgacgatttaagcatggaaggtgccgcgattatgggcagttatgccgaacgcgggcaggctagtctggatgcgggttgcgatatgatcctggtctgcaataatcgtaaaggggccgtcagcgtgttagataatctgagtccgatcaaggcagaacgtgttacacgtttgtatcataaaggtagttttagccgacaggaactgatggacagcgctcgctggaaagcgatcagcacccgtctgaatcagttacatgaacgctggcaggaagagaaagcaggtcactaaccctggcttatgtgaggaagcgatgattatctatttacacggttttgactctaacagtccgggtaaccacgagaaagtcttacaattgcagtttattgacccggatgtacgcttgataagctacagtacgcggcatccgaaacatgatatgcagcatctgcttaaagaagtggacaaaatgttgcaactgaacgttgacgagcgtccgctaatttgcggcgttggcttgggcggatactgggcggaacggattggttttctttgcgacatccgccaggtgatcttcaaccctaatttgttcccttatgagaacatggaaggcaagattgatcgcccggaagagtatgccgatattgccactaagtgtgtgaccaacttccgtgagaagaatcgcgatcgttgcctggtgattttgagccgtaatgatgaagcgcttaacagccagcggacatctgaagagttgcatcattattacgagattgtctgggacgaagagcagacgcacaaattcaagaatatctccccgcatttacagcgcattaaagcgttcaaaaccctcgggtaaatgccctcgtcgcatcaggtaaccttgccggtacctgatgcgctccgaattctgtgggtcggataaggcgtccacgccgcatccgacagtcgagcatcaatgcctgatgcgcttcttatcaggcctaccgaacgccctgcatacacccctcactctatatcactctcacaaattcgctcaaataataaacaataaactctgttttttgatctcacccggtaaagtcgcctatcttttcagcaacaaaacttgattaacatcaattttggtatgaccaatgcaccattcatgttattctcaatagcgaagaacattttcattgctgtaacctgttgttaattaagagctatgttaataaccattaattaacaattggttaataaatttaagggggtcacgttgactacgccattgaaaaagattgtgattgtcggcggcggtgctggtgggctggaaatggcaacacagctggggcataagctgggacgcaagaaaaaagccaaaattacgctggtcgatcgtaaccacagccacctgtggaaaccgctgctgcacgaagtggcgactggcagccttgatgaaggcgtcgatgcgttgagctatctggcccatgcgcgcaatcatggtttccagttccagctgggttccgtcattgatattgatcgtgaagcgaaaacaatcactattgcagaactgcgcgacgagaaaggtgaactgctggttccggaacgtaaaatcgcctatgacaccctggtaatggcgctgggtagcacctctaacgatttcaatacgccaggtgtcaaagagaactgcattttcctcgataacccgcaccaggcgcgtcgcttccaccaggagatgctgaatttgttcctgaaatactccgccaacctgggcgcgaatggcaaagtgaacattgcgattgtcggcggcggcgcgacgggtgtagaactctccgctgaattgcacaacgcggtcaagcaactgcacagctacggttacaaaggcctgaccaacgaagccctgaacgtaacgctggtagaagcgggagaacgtattttgcctgcgttaccgccacgtatctctgctgcggcccacaacgagctaacgaaacttggcgttcgcgtgctgacgcaaaccatggtcaccagtgctgatgaaggcggcctgcacactaaagatggcgaatatattgaggctgatctgatggtatgggcagccgggatcaaagcgccagacttcctgaaagatatcggtggtcttgaaactaaccgtatcaaccagctggtggtggaaccgacgctgcaaaccacccgcgatccagacatttacgctattggcgactgcgcgagttgcccgcgtccggaagggggctttgttccgccgcgtgctcaggctgcacaccagatggcgacttgcgcaatgaacaacattctggcgcagatgaacggtaagccgctgaaaaattatcagtataaagatcatggtagcctggtaagcctgagcaacttctccaccgtcggtagcctgatgggtaacctgacgcgcggcagtatgatgattgaaggacgaattgcgcgctttgtatatatcagcctataccgaatgcatcagattgcgctgcatggttactttaaaaccggattaatgatgctggtggggagtattaaccgcgttatccgtccgcgtttgaagttgcattaatcgacgtacactggcggatgtggcataaacgcctcatccgcccttgaggaacagcgcgatcggcagccgcgttgtatcaggcatcctttcagactcctccgaatccttaagtatttccagccattcccgcgcttttcatcttctgtctgatagctgcttttctccttcgcttgcatgattggcataactgcaaagaaggaggtgttcccgtgaataaaagtatgttggcgggtatcgggattggtgtcgcagctgcgctgggcgtagcggcagtggccagtctgaacgtgtttgaacggggcccgcaatacgctcaggttgtttctgcaaccccaatcaaggaaacggttaaaacaccgcgtcaggagtgtcgcaacgtcacagtgacccatcgtcgaccggtgcaggatgaaaatcgcattaccgggagcgtgctcggcgctgttgctggcggcgtgatagggcatcagtttggtggtggtcgcggtaaagatgtcgccactgttgtgggggcgctgggtggtggatatgccggtaaccagatccagggctctctccaggaaagcgatacttacacgactacgcaacagcgttgtaaaacggtgtatgacaagagtgaaaaaatgctcggttatgatgtgacctataagattggcgatcagcagggcaaaatccgcatggaccgcgatccgggtacgcagatcccgctagatagcaacgggcaactgattttgaataacaaagtataacaaggctgtactctgcaatttggcccctcattcgctcaggctgaggggctttttttgcgacttatttcaccagttcgggccataaacgcaaagtcgttccggcaatctgcatcagtttttccaggcttgcaccttcgcgtgcgctgatgctcatcccctgaataatacaattaaggaattctgccagatgtgtcacgtcacagtggggcgggatttccccgcgcgcttgtcgttgacataaaaactgctgcaaagtgcgctcttgcatcgcatggcgacttttcaacgtattggcgatatctccactatctggggagagggtggtgcagttgttgatcatgaagcagcctgccggggtgtctttgctggtaaagcagttggcgatggcagcaaaatagtcagccagcgcagactccacgcttttctcttcacaaaacagctgtgcttcatgcttagcggcaaaacgatcgatatagcggtcgagaacggcacgaaataacccctctttgttggtaaattccgcgtatagcgtgggcgctttggctccggtcgcttcgacgaggtccgcaagagaagtcgcttcataaccgtgttgccagaacaatttcatggccttatcaagcgcggcatccctgtcgaacacttttgggcggccacggcttttttttacacattgtgtactgtcagttgccatgatgccgttgtacctggtgactgtgaatgaaaggttattataaaaataatcacctccgttcaccagtccagatcccataaaaataattgctttctatttaactgaaatttaaagatttttaaattaattaatgattgttataaaaaatatcttgtatgtgatccagatcacatctatcatttagttatcgatcgttaagtaattgcttgcgacgtcattcatctgcataaggccactattatgaaaaacgtaaaaaccctcatcgctgcggcgattttaagctccatgagttttgccagctttgcggctgtcgaagttcagagtacgccagaaggccaacaaaaagtcggtacaatcagtgctaacgcggggacaaatctgggaagcctggaagagcagctggcgcaaaaagcggatgagatgggcgcaaaatctttccgtattacttctgtaaccggtccgaataccctccatggaacagcagtaatttataaataagcattaaccctcattaatgcctgctactgctgattttttccccgcgacatgccgtgtcgcggggatttttttatccgggctttacagcgtttgtgggctcacttgatgacggcggacatccaccggcatcccggaacggacatccatcacatgttgcatcacttcagcgtcagtttgtgctgcatctttaaaactttgcattgcgctattcagcgtaattggcagcagctgcggatcgtcatcaatcttctcactcagcggctgatgtacttcaaccagacgcgcaccgtttggttcggcagagacttttatcggagtgttgatgatattcactttggtgcctggggtgacctggctaaagagtgttttgatatcgtcatcccgcagacgaatacagccagaacttacccgcatgccaatgccgaaatcggcgttcgtaccatgaagcaaataaacgccgccataggccgccagacgaatcgcatgatggcccattgggttatccagtccagccggcactaccgcaggcaactcaattccctgtgctttataacgggcgcggatgtttgccgttggcgtccaggttgggtttgcacgtttgtcactaacggtggtcaccattgtcggtgtcagcgtgtcaccacctaactgaccaatacctattggatacacggttacgctatttttacccggcgggtagtaatagagacgcagctccgcaatgttgatcacaatgccttcgcgcggcgcatctggaagtagggtttgcaacgggatcgttaacacgctgcccgcgcgcggtacgtaaggatcaacgccggggttagcctgtaacagagcgagaaagccgacgttgtattttttggcgatggcttccagagaaccaccgtcattttccaccacatgaaatttgttttcgccaaccagacgactgcccgctggcggcagcggccaggtgttggcttttgccggtagcgccagcgccacggcagcggcgaacgtaaaaaacgttagccagcgagaaaaacgcgttttgatcatcaccaaaaatccataataaatataaggttattgtaataaacagataagcctgaattatggatggtgacagtgtcggatagtgcagggaagtgcaaagaatttgtaaatgttgcagatgggggcgcagaaacgcccccgatttaccattaagcgatcgcgttctcttccagttcacgcataaactggcgtacccattcgatacgcgttttccgctcactcaaatcctgaataaatttcaggcgcgtcggaccatcaaggcggtaatgctgcggctgtttttgcagcaaaccaatcaaccaggccggattaacgtgattcttctcggcaaattcgatcaccccgcctttctcattaccttccagcttcctgatccccagtttctgcgcttgctggcgcagacgggcaatatccagcagggtacgcgccggatctggcagcaggccgaagcgatcgataagctcgactttgatctcttccagttcgttttccgttttggcgctggcaatacgtttgtagaagctcagacgcgtgttcacgtcagggatgaaatcatctggcaataggctcggcatccgcagctcgacttctgtttgctggctggtgagatcttccaggctcggctcgcgtccggctttcagtgcatcgacggcgttttccagcaactccatatacaggctgaaaccgatggtttccatactgccgctttgttcttcgccaagcagttcacccgcgccgcgaatctccagatcgtgcgttgccagcgcaaaacctgccccgagatcttccaggctggcaattgcttcaagacgtttttgtgcatcggtagtcatcgcttttggatgcggtgtcagcaaccatgcatatgcctgatgatggctacgtccgacgcgaccgcgtaactggtgcagctgcgccagaccgaagtgatccgcgcgttcaatgataatagtgttggctgtcgggatgtcgatcccggtttcgataatggttgtacaaaccagcacgttgaaacgttgatgatggaaatcattcatcacccgttccagttcgcgctcgcgcatctgcccgtgaccgatggcgatccgcgcttctggcaccagttctgccagccgttcggcggctttctgaatgttttccacatcattgtagagataataaacctgtcctccgcgcaaaatttcacgcaggatcgcctcccggaccaccatgctgtcatactcacggacaaaggttttaactgccagacgacgggcgggcggcgtggcgataatgctcaggtcacgcattccgctcattgccatattcagcgtacgtgggatcggcgttgcagtaagcgtcagaatatccacgttcgcgcgcatcgctttaatgcgctctttatgacgcaccccgaagcggtgttcttcatcgacaatcagcaggcctaaatctttaaacttgacgtcactttgcagcagtttgtgcgtaccgatcagaatatcgattttcccttccgccacttccgcaaggatttgcgtctgctctttggcgctgcggaaacgggagatcatttcgatacgtaccggccagttggcgaaacggtcgcggaagttgtcgtaatgctgctgcgcgagaagggtggtaggcaccagcaccgccacctgcttgtggttatctactgccaggaaagctgcgcgcatcgccacttctgttttaccaaagccaacatcgccgcacaccagacgatccattgccagcggctgacacatgtcgctaagtaccgcattaatggcctgcgcctgatccggcgtggtttcaaacgggaagctgtcgcagaacaactgatactgctcacgatcgtgtttaaacgcgaagccctctttggcggcgcgttgcgcgtagatatccagcaattccgccgccacatcacgcactttttccgccgctttctgccgcgcgcgactccacgcatcgccgccaagtttatgcagcggggcgttttcttccgcgccacctgcgtaacggctaatcagatgcagactgctcaccggaacatacagtttggcgtcgttggcataggtgagcatcagatactcgccagtaatgccacccgcttccagcgtggtcattccggcataacgaccgacgccgtgctccagatggaccaccggctgaccaatatgcagttccgcaaggttacggatcagtgtatcggggttgatggtgcggcgagaatcctgacgacgacgggcaacgcgttcaccgagcagatcgctttcgcaaatcagcgccagattacgcaccgtatcgacaaaaccatgttcggcagcgccaatcatcagataacgcccacggtcgctggcttcatcaagacgcataatgcgttgcggagcaattttaattcgtgcgagcagttcacccagcgcttcacggcgaccttcactttctacgctgaacaccaccggaccgtcgaaagtctcgaggaacttacgcagcgcatccagcggcgctttttgttgtgcctgaacggccaggtctggcagtttctggaaacctaaattggcattcgcggcttttgtcggtaaatgttcagtttttagctgcacccggggccagtttttcagctcactgaagagctcgtccacccgcagccagaggctttgtggtggcaacagcgggcgcatcggatcgacgccgcgattctcaaaacgcgccagcgtgtcagcctggaaacgttcggcactggtttccagatcgccagtattcacgagcaaggtattggcagggaaataactgaacagcggcggcagtggttcgctgaagaacaatggctgccagtactcgatcccggcaggtaatgtgcctttactcacttgctggtaaatatgttctggatcgcgcttcacttcgaaggtatcgcgccactggctgcggaacagttcaattgccgctttatcggtcggaaattcgtgcgcgggcagcagattgatcgcttctacttcctccagcgtgcgctggctgtcgacgtcaaacacccgcaggctgtcgatttcatcatcaaagaaatcaagacgataaggcagctcactccccatcgggaagagatccagcaacgcgccgcgcgtggcgtattcgccgtgctccatcacctggtcaacatggcgataaccggcgctgtccagttgggttcgtaatgcatctcgactcaggcgctgaccttttttcatcaccagcgcatgaccgtggagaaaactgtgtgggcaaacgcgctgcataagcgtattcaccggaacaatcagtacgccacgctgcatcgtcggtagctggtaaagggtggaaaggcggctggagataatgtcctgatgagggctaaaactgtcgtagggaagagtttcccagtccgccagattcatcaccatttgatcggtaaactggctgatttcatcatgcaaacgcagagcattttgcatatctggtgcaatgagtaccaccggaccggcgtgacgttcggcaatttccgctaccagcgttgcacaggctgcgccggttaactcgcccagcagacgctgctcacccgctttgacgggcagcgtataacgatattgttcaggcataacggttgtcagattctcgttaggatatgcctcaacatatgggggcatatctctgataagcaatgctgttcattatccgtaatcgacatggtttagcaaattgaatcgccccggctggggcgatggcttagcgggagtaactgacggcagcgggcagactaggcggggagaacaacagatcgctgaatgcacgctgactaagttttcttaccagcaagcccgcaacagtacagatgaacaaactgacaaagggataaaccagcaggagtgtcagttcgacttgcgggctccagcgtgctgcgttcatttgcgcaagcagagttaagctgaatatttcaaccagaatgcgatgggtggtgtagatagcaatggtgttggagccaatcacattcagcaggctggtggagcgcataccgaatcgttgctcgtattgataaaacagcttcatgatcaccacaatgcttaccaggctcaacagcaggctgatagtaaacaaccaggcaccgaccgccagaacggtaagcaaagaagccatcagcagatggcggcgcaacggcacctctttaacacaggtcattattgttgcgccaaaccatgcgccaaggctgtaataaggcaaattgcggatcacactgttcattccccaccacggcgtgggaacgaaattaaccgccacactcagcagtacaaacaaggcgaatagtggcagcgccagacggctaaaaattttacataccacgaaatagacaattaacgcatacagataccacaagctggtgctggcggtgatcatcccgtgcaggaactcaccggtggaatcggcataagcggcattggaggcattgcttaaatcgcgctcaggtgccagccactggttcagcgcacttaacgccagccactgcaccacgccccaaagcgccagcacccagaagatgttccagatccgtttatcgagacaatttccccacggtacgctgtcgatatagcggcgaatcaaatagccggatataaagaaaaaaaccggcatacgaaagggggcaaggtaaagattgaaatagatccagcatttgctcaggacttcgcttaacggatgctgaaaagtggtcagatgcggataaaaggtaatgacgctgtgataaatcaccaccagacaaatacataaccctttgatctggttaatccatagctctttttgtttcatcaggacaacacgctcttttttaatttacatgcggttgatcctgcgggttatgacccgaggtgtaatgggtatctgtctgtattggatgatttttcagattaagatcaggcggcaagattgatgataaaacatggcaatttagccgattgatttacgggggcttttcagattagccctgacgatcacttacagttcagacgtttacccatcttgctttcgcttatatactcgtgtctttgctacagcaaccagacggatttcatgtaccaacctgtcgctctatttattggcctgcgttacatgcgtgggcgtgcagcggatcgcttcggtcgtttcgtctcctggctttctaccatcggcattaccctcggggtgatggcgctggtcacagtattgagtgtgatgaacggctttgagcgcgagctgcaaaacaacatccttggcctgatgccacaggcaattctctcttctgagcatggctctcttaacccgcagcaactcccagaaacggcagtcaaactggacggcgttaatcgcgtcgcacctattactaccggtgatgtggtactgcaaagcgcgcgcagcgtggcggtcggggtgatgctcggtatcgacccggcgcaaaaagatccacttacaccgtatctggtcaatgtgaaacaaactgacctcgagccggggaaatataatgtcatcctcggcgaacaacttgccagtcagctaggcgttaatcgcggtgatcaaatccgcgtgatggtaccatctgccagccagttcacgccgatggggcgtattccaagccagcgcctgttcaatgtgattggcactttcgccgccaacagtgaagtcgatggctatgaaatgctggtgaatattgaggatgccagccgtctgatgcgttatccggcaggcaatattaccggctggcgtttgtggctggatgagccgctgaaagtcgacagtttaagtcagcaaaaactgcctgaaggcagcaaatggcaggactggcgtgatcgtaaaggcgagttgttccaggccgtacgcatggaaaaaaatatgatgggtttactgctgagcctgattgtcgccgttgcggcgtttaacattattaccagtctagggctgatggtaatggagaagcagggcgaagtagcgatcctgcaaacgcaaggcttaactccgcgacaaatcatgatggtctttatggtgcaaggggccagcgccgggattatcggtgcgatcctcggagcggcgcttggcgccctgcttgccagccagttaaataatctgatgccgataatcggcgtcctgcttgatggcgcggcgctgccggtggctatcgaacctttacaggtcattgttattgcgctggtggcgatggctatcgcgctgctgtctacgctttaccctagttggcgcgctgccgccactcaacccgctgaggctttacgttatgaataagatcctgttgcaatgcgacaacctgtgcaaacgctatcaggaaggcagtgtgcaaaccgatgtgctgcacaatgtcagtttcagcgtcggcgaaggtgaaatgatggcgatcgtcggtagctctggttccggtaaaagtaccttgctgcacctgctgggcgggctggatacgccaacctccggcgatgtgatttttaatggtcagccaatgagcaaactgagcagcgcagcgaaagctgaactgcgcaaccagaagctgggctttatttatcagtttcaccacctgctgccggattttaccgccctggaaaacgtggctatgccgctgctgattggcaagaaaaagcccgctgaaatcaacagccgtgcacttgagatgttaaaagcggtggggctggatcatcgtgcgaatcaccgcccatctgaactttctggcggcgaacgccagcgtgtggcgattgcccgtgcgctggtgaataacccgcgcctggtactggcggatgaacctaccggtaacctcgatgcgcgtaacgccgacagcatcttccagttgcttggggaattgaatcgcttgcagggcaccgccttcctggtggttactcacgacctgcaactggcgaaacgtatgagccgccagttagaaatgcgtgatggtcgtctgacggcggaactgagcctgatgggggcggagtaatggcgatgcctttaagcttattaattggcctgcgttttagtcgcggacggcggcgcggcggcatggtgagcctgatctccgttatttctaccattggcattgccctcggcgtggcggtattgatcgtcggcttaagcgcgatgaacggctttgaacgcgaactgaacaaccgtattctggcggtggtgccgcatggtgaaatcgaggcggtggatcagccgtggactaactggcaggaagcactggatcacgtgcaaaaagtgccgggtattgccgctgccgcgccgtatatcaatttcaccgggctggtggaaagtggcgcgaatcttcgcgcaatccaggtgaagggcgttaacccgcaacaggaacagcgtctgagcgcattacccagctttgtccagggcgatgcgtggcgcaattttaaagcgggcgaacagcaaattatcatcggcaaaggcgtggcggatgcgctgaaagtgaagcagggggattgggtgagcattatgatccccaacagcaatcccgagcataaactgatgcagccaaaacgtgtgcgtttgcacgttgccggtattttgcagttgagtggtcaactcgatcacagttttgccatgatcccgctggcggatgcccaacaatatcttgatatgggttccagcgtgagtggtattgcccttaaaatgacggatgttttcaacgccaataagctggtacgcgatgcgggtgaagtgaccaacagctatgtttatattaaaagctggattggtacttacggctatatgtatcgcgatatccaaatgatccgcgccattatgtatctggcgatggtactggtgattggcgtggcctgtttcaacatcgtctccaccttagtgatggcggtgaaagacaagagtggcgatatcgcagtattaagaacgctgggggcgaaagatggtttaattcgcgccatctttgtctggtatggattgctggcagggctgttcggcagcctgtgtggtgtgattatcggcgtagtggttagtctgcaacttaccccgattattgagtggattgaaaagttgatcggtcatcagttcctctccagcgatatctattttattgatttcctgccaagcgaattgcactggctggacgtcttctacgtactggtcacagcattgttgctgagtcttttggcaagttggtatccggcgcggcgcgccagtaatattgaccctgcgcgagtccttagcggccagtaaaggcagtacattaaaacaaggagcggcaatgtattacgggtttgatattggtggaacaaaaattgcgcttggcgtgtttgatagcggtcggcagttgcagtgggaaaagcgggtgccgacaccgcgtgacagctatgacgcatttttagatgcagtgtgtgagctggtagctgaagctgaccaacgttttggctgtaaaggttctgtcggcatcggtattccgggaatgccggaaacagaagatggtacgctgtatgccgccaatgtccccgctgccagcggtaaaccgctgcgtgccgacctgagcgcacgtcttgatcgcgatgtacgccttgataacgatgccaactgttttgcccttagtgaagcctgggatgatgaatttactcaatatccactggtgatggggttgattctcggcaccggtgttggcggcgggctgattttcaacggcaaaccgattaccggtaaaagctacattaccggcgagtttggccatatgcgtctgccggttgatgcgttaaccatgatggggttggatttcccgttacgccgctgcggctgtggtcagcatggctgcattgaaaattatctgtctggtcgcggttttgcgtggctgtatcaacactattatcatcaaccgttgcaggctcccgaaattattgcgctttatgatcaaggcgatgagcaggcaagggcgcacgttgagcgttatctggatttattagcggtttgtctgggaaatatcctgaccatcgttgaccctgacctggtcgtcattggtggtggcttaagcaatttcccggcaatcacaacgcaactggcggacaggctgcctcgtcatctcttacctgtagctcgtgttccgcgcattgaacgcgcgcgccacggtgatgcgggaggaatgcgtggtgcggccttcctacatctaaccgattaaacaacagaggttgctatgctgagccgtcggggtcatcggttaagtcgttttcgtaaaaataaacgccgcctgcgcgagcgtttgcgtcagcgtatttttttcagagataaagtggtgccggaagcaatggaaaaaccaagagtactcgtactgacaggggcaggaatttctgcggaaagtggtattcgtacctttcgcgccgcagatggcctgtgggaagaacatcgggttgaagatgtggcaacgccggaaggtttcgatcgcgatcctgaactggtgcaagcgttttataacgcccgtcgtcgacagctgcagcagccagaaattcagcctaacgccgcgcatcttgcgctggctaaactgcaagacgccctcggcgatcgctttttgctggtgacgcagaatatcgacaacctgcatgaacgcgcaggtaataccaatgtgattcatatgcatggggaactgctgaaagtgcgttgtagtcaaagtggtcaggttctcgactggacaggagacgttaccccagaagataaatgccattgttgccagtttccggcacccttgcgcccgcacgtagtgtggtttggcgaaatgccactcggcatggatgaaatttatatggcgttgagcatggccgatattttcattgccattggcacatccgggcatgtttatccggcggctgggtttgttcacgaagcgaaactgcatggcgcgcacaccgtggaactgaatcttgaaccgagtcaggttggtaatgaatttgccgagaaatattacggcccggcaagccaggtggcgcctgagtttgttgaaaagttgctgaagggattaaaagcgggaagcattgcctgatgcactacgcttatcaggcctgcaaggggacgcaattaattgaatttgcgggttttgtgggccggataaggcgttcgcgccccatccggaataatacacgcgcacttttccggcctcttttatcgtttactcgtcaataacaatgcggcaataaacgtacagacaccaattagccctgcccagagtgggcttattctggtaatcgcaaagctattatcgatatacaaacataaagcctgataacccatattggcaatagtcatcgccactgcaaattttaacgcataaataaaacgagtcgtgtagtaaaagatcctggaaaataagataaacgtcgcagcccaggcgataaaacctaatgtgttggtgctgccggggggagcattttcatgctgttgtcctggatgcggataatacgttagtggcggcgtgctttgttttaatatctgtgcttgtagaacagccaatgcattattgattccctgataccagagatctgcatttaaataagccagcgtgtgattttctatcagaaggccgagatgtttatcgtccagaccactttcaacctggccgttggtgatcataattaaccgtggttcgcgggtagtaaatagtaacagaacacttccttttacatcactcaaactagaactcgcatgcgccagcatcgctttaccattttgtctgagactggcttcattattaatgtcgggtaaaaccacaataaacggtgcaattcccgtttgttggcgaaaaagctcggctttatgcgcgatctcttcagcatctggtacagtaccggtaacgtccgtaaaaagtgtcttcattattggaattaatggcttgctggctgctgtcagaggcaggagtatcagtaaactgagcagtataatgaattttttcatgggcgggacttccgtttcctgcgactttttttagaggagggcatacttattaataaaccgacggcgataaaaataacgcccataatgccgataaacccccatttaaaaaaattaacccacgggttatttatctcagccttttcaggatgcccgggagaataataaacattaactttatcgccttcgctgtcttcataaaaatcgctgccgatactgctattgaaaattagcgtgtaatctggcgtcggtcgaaaggcaacgacgggataccagctaccatctttacccgtgcgatgagaatgactggagtgccagacggtatcaacaatgacgccttcggtatgaatcgcgtctttgctataggtgaactggttataaaagacaacaacagaaatgaggatcagtaccagaccgataccgaggaatatacgaaagaaaactttactgtcctgactcattagccacatccttgctaactaaaaaacgggcggtaataccaccgcccgcttgctgaattaacgtcctgctttcagcttctgataatactcttcataaatgctgctggctgcgccaacgtcattctgccattcgccatttttaatggtttcagcatccgggtagagtgttttatcgttcgccacttctggacttaacagcttacgcgccgcaaggtttggcgttggataaccgatagtttcagcaacctgttttgccacatccgggcgcagcaggaagttgatcaatttcagcgcgccttctttgtttttggcatttgccgggatcgccaggctgtccatccagaaaatgccgccttctttcggccacaccacgtcaattggcgtacccgcctggcgtgcaacgaaagcagaaccgttccagatcatgccgaggttaacttcgccttccatgtacgggttcgccgggttatcggagttaaaggctgccacgtttggcatcagttttttcagctcgttatatgcagcttcaatctctttcggatcggtggtgttaccggagtagcccagcttacgcagcgccatctggaacacttcacgggcatcgtcggtcaacagcaggctgcctttgtactctggcttccacagatcggcccagctggtgacagatttcggatccaccgcatcaccgttaacaccaatcgccgtcgcaccccagatatacggaatggagtagtcgttattcgggtcaaaaggcttgttgagcatgtctggatcgagattgctgaagtttgttaacttgctcttgtcgatcttctggatcatcccttctttacgcattttatcaacgtaataggtactaggaaccaccagatcataggcaccgtctttgtatgttttcagcttggcgtacatggtttcgttgctctcgtaagtgctatagataaccttaataccggtttctttggtgaactgttcaagcagtcctggcggcacgtactcggtccagttgtagaaatacagcgtgttgttgtcatcggcgtgagcggcgctcatgcccagtgccagagcacccgccgcgagcaggtggcgactccattttttcatttaacgtcccctgtgttacctttcgttttatcacgagcaataagctggctggcaataaccatcaccaggctcagcaccagtaatatggttgccagcgcgttaacttccgggcttacgccgactttgaccatgctataaatttttaacggcagaatttcataacttggtccggtgacgaagctagaaactaccacatcgtccatgctcagggtaaagcttaacacccagcccgccgccaccgctggcattgccagtggcagaatgatttttcgcagaatggtaaattcgctggcaccgagatctttcgccgcttccagcattcgcacgtcaaaacctttcaggcggctatacaccgtcaccaccacaaatggcaggcagaaggtgatatggctgaacagcaggctccagaagccaagctgaatacccagcagcataaacagcaccagcaggctaatcgccatcacgatatctggactcatcatcaccacaaacagcattccgctaacgaacggcttaccacgaaagcgataacggtacagcgcaactgccgtcagactaccgataagcgtagcaaacgtcgcgctaaacaccgccattgttagactatgctgcgctgcctgtaacaggctgtcgttgttcatcagcaggctataccatttggtggtaaagccctgccagttgatgccaaagcggctgctgttaaaggagttcacaatcaaaataatgattgggatatacaggtacgcgtagatagcggtcataaaaccgccgcgaagcagtcgaccgatcattcgagttccaccttcttattcagcaaacgagaagcgcgccagtaaaccagcaacatcaggcccattacgatagtcagcgtaatgctggtagctgcaccaaacggccagtcacgaatattaaggaactggaccttgatgacgttaccgatcagcaggtttttcgcaccgcccatcaggtcggatacatagaacaggcccatcgctggcagcatcaccagcagacatccggcaataattcccggcatcgtcagtggaataatgatacggataaaagtctgtaacttgctggcaccgagatcgcgcgccgcctcaagcaacggcttatccagtttttcgatactggagtacagcggcatcaccataaacggcagcagaatgtaaaccagaccgataatcaccgcactgggcgtgaacatgatacggattggtgtgtcgataacgcccagccagagcaaaaactcgttgagatagcctttggtgctgaggaaaattttcagcccgtagatacgaattaaactgttggtccagaacggaacaatcagcagaaacagcagcagcggacgcaccttgtgtggcaacttcgccagaaaccaggcaaacgggtagcccagcaccaggcaggcgagggtggcgatcagcgccatattcaggctgtgcaatagcacttcaaaatagagcggatcgagcagacgcgtgtagttatccagcgtaaagaccattttgacaaaactggcgtcgtcgcgggtcaaaaagctggtgccaatgatcatcaggttgggcagaaagacaaacaacacaagccaaccgacaatagtgacaatcactacattctggaacttacttgtgttcttcatcagccagtacgacctcccagctttctacccaattaatggccattttttggtcgagagagtggtcaaagtcaggatcgtcttcattgaagaattcgctgaccatcaccatcttgccattttccagttcaacaacgctctccagcgtcatgcctttgtagttacgctcgcgaacgtaaccaatcagcccttcagcgtggttgtcgtcgttaatctcttcaacacgtaagtcttccgggcgcagcagaacatgcagtttttgccccggttcaacggcgaagttaacgtagatattacattcgcggccttcaacgttggcgcgtacgcgctgctcgtctagacgttcgatgacagtggcgttaaacatattgatttcgccaatgaagccggcaacaaacaggtttttcggctcttcgtagatttcacgcggcgtgccgtcttgctcaatgcgaccatcgcgcatcaccacaatcctgtcactcatggtgagtgcttcttcctggtcgtgagtcacaaagacgaatgtaatgccaagcttacgctgtaacgctttcagctcgttctgcatttgcttacgcagtttgtaatccagcgcactgaggctctcatccagcaacaacagacgaggcttgttaaccaccgcgcgagcaatggcgacgcgttgctgttgaccaccagagagctgatgcggtttgcgttgagcgaaggtttccaactgcaccatccgcagggcttccatcacgcggggcgtaatttcagcagcgggggttttttgcatgcgcaacccaaaggccacattttcgaacacggtcatgtgggggaaaagtgcgtagctttggaaaacagtgttcacatagcggttttccgccggaacgtgggtgatgtcctcgttatccagcatgatgcgtccggaatcaacagtttccagacctgcaatcaggcgaagaacggttgttttaccgcagccagaagggccaagcagcgtgaggaactcgccattgttgatagtcagatccagctggggaatgacctctttaccatcaaagcatttgcgaattcccgccaattgcaccagcggactaaggctactcggttgtttattcaattttttactctgtcccatgtaaacgcaacggatggcttaccgatgcggggtttgtggttaaccaccttggtgactcttaatgagggcggtaattctacggcaaaccgcttgaatcgccaatctttgttgtgaattactggcttagctttatattcattaaggtaatgctgataaatattcccgcttgcaggggtaaaagtgacctgacgcaatatttgtcttttcttgcttcttaataatgttgtcacaaaaagtgagggtgactacatggataaactacttgagcgatttttgaactacgtgtctctggatacccaaagtaaagcaggggtgagacaggttcccagcacggaaggccaatggaagttattgcatctgctgaaagagcagctcgaagagatggggcttatcaatgtgaccttaagtgagaagggcactttgatggcgacgttaccggctaacgtccctggcgatatcccggcgattggctttatttctcatgtggataccagtccggattgcagcggcaaaaatgtgaatccgcaaattgttgaaaactatcgcggtggcgatattgcgctgggtatcggcgatgaagttttaagtccggttatgttcccggtgctgcatcagctactgggtcagacgctgattaccaccgatggtaaaaccttgttaggtgccgatgacaaagcaggtattgcagaaatcatgaccgcgctggcggtattgcaacagaaaaaaattccgcatggtgatattcgcgtcgcctttaccccggatgaagaagtgggcaaaggggcgaaacattttgatgttgacgccttcgatgcccgctgggcttacactgttgatggtggtggcgtaggcgaactggagtttgaaaacttcaacgccgcgagcgtcaatatcaaaattgtcggtaacaatgttcatccgggcacggcgaaaggagtgatggtaaatgcgctgagcctggcggcacgtattcatgcggaagttccggcggatgaaagcccggaaatgacagaaggctatgaaggtttctatcatctggcgagcatgaaaggcaccgttgaacgggccgatatgcactacatcatccgtgatttcgaccgtaaacagtttgaagcgcgtaaacgtaaaatgatggagatcgccaaaaaagtgggcaaagggttacatcctgattgctacattgaactggtgattgaagacagttactacaatatgcgcgagaaagtggttgagcatccgcatattctcgatatcgcccagcaggcgatgcgcgattgcgatattgaaccggaactgaaaccgatccgcggtggtaccgacggcgcgcagttgagctttatgggattaccgtgcccgaacctgttcactggcggttacaactatcatggtaagcatgagtttgtgactctggaaggtatggaaaaagcggtgcaggtgatcgtccgtattgccgagttaacggcgcaacggaagtaagcgaaaagggatgcggcatgtgatgccgcatccggcttaaatccaaacttacccttcgaagaaccaatacccgctattgaccagcgccgcgagcatcgcgaggaaactcggatcttccagcgcatcgccaaaattctccgcagtcagcgcaatgttgctggcgagtgcatccagtgccggacggtgcggggaatcgatcttctcaccattggcatacacgtcgtcgccaatgcgcaatacgcgcagaccacccaggcgcaccagcacttcaccttgtttcagcgcatcgtagatttcatccggctgataaggcggctctggcggcgcgatatccagttcatgacgactctgggatataaactcgccaaaccattgcttaaagtgttccggctggttgatcaattcgagcatcatctcacgcagtttatccatctcttgcggcagaacatccgcaggatgagcgcgaggtggaacatccggatcgctgtagtagttgccgcccagttcacgttgcagcacataatcggcaaatccactaatcagttcccgcgtatttggcgcgcgaaagcccacggaatagttcatcgcattttccagcgcgtagccttcatgcgggaatcctggcggaatataaagaatatcaccaggctccagctcttcatcgatgatggcttcgaacggatcgacctgtaacagatccggatgtgggcagtgctgtttcatttgcagcttttcgcccactcgccagcgacgacgtccggtaccctgaatgataaacacgtcgtactgatcgagatgcgggccgacgccgccgccgggtacagaaaaagaaatcatcagatcatcaatacgccagtccggtagttcacggaacggtcgcatcagcgcggcggtcggctcatgccagtggttcactgcctgtaccagtaaactccagttggtttcaccgagatgatcgtagctttcgaacgggccgtggctgacctgccatttgccatcctggtgactgaccagtcgactgtcaacttcgctttccatcgccagacccgccaactcgtctggagagatcgggtcaataaaattattaaagccgcgttttaacaccaccgggcgtttctgccagtgacgttcaagaaaatcgggccagttaagagtgagttggtattccatgttaagcatccacaggctggtatctgcaaccgattataacggatgcttaacgtaatgcgtgaagtatgggcatatttattcatctttcggcgcagaatgctggcgaccaaaaatcacctccatccgcgcaccgcccagcatgctctctccggcgacgattttaccctcatattgctcggtgatttcgcgggctaccgccagccctacaccttgcccagggcgtaaagtatcaacccgttgaccacggtcgaaaatgacctctcgcttgcttaatggaataccggggccatcatcctcgaccacaatatagagatgctcgtcggtttgccttgcagaaatttcgacaaactcgaggcaatatttacaggcattatccagcacgttgcccatcacctcgacaaaatcgttctgctcaccgacaaagctgatctctgggctaatatcgagagagatattgacccctttgcgttgatacactttgttcagcgcactggtgagattgtccagcagtggggcgaccggatgcagctcgcggctgagcaatgtcccgccgcgcatactggcacgatgcaggtagtagccaatttgctgactaatgcggctgatttgctccagcattaccggctcagcatcactgacgctcatcttttcactacgcagagaacgcagcgtactttgcagcaccgccagtggcgttttcagactatgggtcaggtcggtgagcgtcgtacggtatttgtcgtaacgttcgcgttcactttttaacaatcggttcaggtttcgtaccagactggtcagttctcgcgttgtggctggattgagcaattcgcggttatgttcttccagttcgcggacttcttttgccagggcttcgatggggcgtaaactccaccaggcggcgacccacagcagcgggatcactaacagcagattggcactgagcacatagataaaccagctccagaccatataggaactttttagctccaccggaatggtatccaccaccacaatggttaattttggcatccggcttgttgccgggtagacgtttactgccacgctgtgggtcatctccgcgtcgtcatcatcttcccgcacttcctgcaactgttgctgtatgctatgatctccactcagcaagaggctggtatcgttaacatccgcttcaatttcatgaaaaccattgcttttcagccagtcaggctggatcatcttcatcagccagggcacgtcacgttgcgcccataaaagctgcccgttctcatcataaattagcgtcatggtggggctttgcttgtcgatattttcgggtaactcgacatgcaacttattgttttcccacttcgcaagggtatagaacagattgctctcgccacgtaacagccgaaacgtagttttatcgaaactgacgctataaccgatcagcgcgaccattccgtaggcaaggctaagcaccagtactaccgctgccgttgccaacagaaaacgtacccgcaggctgagcgggaaaaaaagacgcagtaattttttcatcagcgcaattcgaacagatagccctggccgcgaacggtggtaatcacttcttggggatattgtgcctgaatttttttgcgcagacgtcccatcagtacatcaatggtatggctttcccgcagctccgcatccggatagagttggagcattaagctatctttgctgaccactttgccattattgcgtatcaacgtttccataatagtgtattcgaacgcggtcagtttgatcacttcgtcattaatagataattcacggcgagagagatcaacctgaaacggggggaggctaatgacctgactagccagaccgctattacgccgcattaatgcctgcattcgcgccatcacctcttcaatatgaaacggtttagtcacataatcatcagcaccggcacttaatacttcgactttgtcctgccagctttcacgggcggttaataccagaatcggcagactaacatcgttgctacgccagcggcgaatcagactcagaccgtcctcgtctggcaatccgagatcgacaatcgcaatatccggtatatgttcattgagataataatcggcttctttggcatcttctgcgtcatcgacctgatgaccagcatcctgaatctgaactttaaggtggtgacgtaacaacgcattgtcttcaacaaccagtacgcgcatttttatttctccctgtcttaattattaaaatagtgtaacgcgattatgtggttatgggggtaaacattaaataaaccagcggggaggggaggtaaagtgaaaaaataaaaagcggataatcttaataagcaggccggacagcatcgccatccggcactgatacgaggtttatttcagctcatcaaccatcgtgatagctcgaccaatatagttagccggcgtcatcgctttcaggcgggctttctcttcttctggcaacgccagaccatcgataaactgcttcatgccttcggcgtcaacgcgcttaccgcgagtcagctctttcagcttctcgtacggtttttcgatgccatagcgacgcataactgtctggattggttcagccagcacttcccagttgtgatccagttcatccagcagatggtcacggttcacttccagtttgctcacgcctttcagggtggattgatatgcaatcaaggcataaccgatacccacgccgaggttacgcagcacggtagagtcggtcaggtcacgctgccagcgggaaaccggcagtttgcttgccagatgctgcaataccgcgttggaaaggcccagattcccttcggagttttcgaagtcgatcgggttaactttatgcggcatggtggaagaaccaatctcaccagcaatggttttctgtttgaagtggttaagggcgatataaccccagacgtcacggtcaaagtcgatcagaatagtgttgaagcgcgcaacgcaatcaaacagttcggcaatgtagtcgtgcggttcgatctgggtggtgtacgggttccactgaatacccaggctggtgacgaactcttcgctgaactgatgccagtcaacttccgggtaagcggcgatgtgggcgttatagttaccgaccgcgccgttgattttgccgaggatctccacctggttaagctggcggtactggcgctccatacggtaggcgacgtttgccatctctttaccgatggtactcggcgtggctggctgaccgtgggtacgagacagcagcgggatatcgcgatactgaacggcgagatctttaatgccatcaatcagttgacgccagtatggcaggatcacttcatcacgcgcggttttcagcattaatgcgtgggagaggttattgatatcttcgctagtacaggcaaagtggatgaattcagaaaccgcgtgcagttccgggatctccgccactttttctttcaggaaatactcaaccgctttaacgtcgtggttagtggtacgctcgatagttttgatgcgcgccgcatcttcttcgctgaaactggcgacgattgcatcaaggtaaccgattgcgtcggcagcaaaagcaggaacttccttgatcgctgcgtgcgcggccagtttttgcagccaacgtacttcaacttgtacacggaatttcagcaaaccatattcgctgaaaatcccgcgcagcgcgctgactttatcgccgtagcgtccatcgacaggggaaacggcggtcagactggataattccatagatcacaactccggggttaaatgagcaagaatttgttttgcctgagtggtcaggcgattacgagaaaacatcagttgcagacgtccgccgccgacctggtgccagagcacggcggcgcgaatgcctgccagcagggttgcgcgaactttcgcctgcacttgtgggctttgcagtacagcaggggaaccggtgacctgaatgcgcgggccaagcgggctaatcacatcaacatagatagcagccatcgcgctcatcagcgtttcggactgtaaatcgaagtgttcgagctggcgttgcaggccgttgatccggttgcccagagtgtcgagcgcgcctttcgcactggagagtttgcgctcaagcaccatcaagctgagtgtgtagcgggttaattcggcgtttaagccctggcgactgctggcattgagcacgccgagcagggtttccagcccgacgcgcaggttggcttcgctaccgccaaaaaccgccagcgtgctgctggggttcatatcaataatactgttgagactgacgtgtagcgcatcggcatcacaatgcccctggtgagcgagttgttgcaccaggcgtgcgctctgacaaataccggccagggcgagggtgatgtcatagtaattctttgccacgttcactgcttccttgttttaagtaaagataataatcagaccggcagcggcagacgctgctcaataataccgccaccgaggcacacttcaccgttatagaagacggcagactggcccggcgtcacggcggcaaccggttcatcgaaaatcacttcaatgcgatcatcgtccagcgccttgacggtgcaagggatatcggtctggcgatagcgggtttttaccgtgcaacgcatagtgccggtgaatggttcgcgatcgacccagtgcaactgctgggcaatcaacccgacagacatcagccgcgggtgttcatggccctgagcgacaaccagaatgttgttttcgacgtctttgtccaccacataccacggttcttcggtaccttctttggtgccaccgatacccagacctttacgctgaccgagagtgtgatacatcagcccctggtgctcaccaatttcatcgccatcgacggtaatgattttgcccggttgcgccgggagataacggcccaggaactcgcggaatttacgttcgccaatgaagcaaatgccggtagagtcttttttcttcgcggtgaccagaccaagatcttcagcaatcttacgcacctgcggtttttccagttcgccgaccgggaacaggctttgcgcaatctgctcatggctgagcgtataaaggaagtagctctggtctttattgctgtccagaccacgcagcaggcggctcttgccatcgacatcggcccgacgtacgtaatgaccggtagcgatataatcggcacctaaatcttcggcggcaaattcgaggaaggctttaaatttgatctctttgttgcacagaatatccggattcggcgtgcgaccggctttatattcggcaaggaacagttcgaagacgttgtcccagtactcggcagcaaagttaacggtgtgcagttcaatgccgagcttgtcgcagacagcctgggcatcagccagatccgctgccgctgtgcaatattcctcaccgtcgtcttcttcccagttcttcataaacaggccttcgacctgatatccctgttgttgcaacagccaggcagaaacggaggaatcgacaccgccggacatgccgacgattactttttttgcggtttcagacattggatcactcacgacattgaacttcaaggcggcgtattctatcacgcagccttttagatgacaccctttgtaaaaggccagttaaaatcgccaatcatctccagcggataacgttgcccgctttgataacaacgaatactttccgccaccagcgggctacgaagattactcgcctgtaaaatttcttcggcgctgacccaacggcagcagtcgatatcgctgtcatgaggctgggtcgggcatatttgctcaagctcaatggcaaagaggaaacgcaaaaacggcgttttatctggcgcaatccactgatgcatacgaataaagtgttgcggctgcgcgctgatgccggtttcttcccacagttcacgggcggcggcttccactaaggtttcatcggcttccagatgcccggcaggttggttccataacgctttaccattaatcgtctcttcaacgactaaaaatttgccttctgcgtgcaccacgcaagcaacggtaacgtgcggtttaaacattttgcatccttaatctgtcacttctcgccattcaccattggcaagattatccaaagagtaatcacccatcgcatagcgaatcagtcgcagcgtggggaagccaacatgggcggtcatgcggcgcacctggcgattacgtccttcatataaggtgatcttcagccagctggtgggaatacttttgcgttcacgaattggtggattccgcggccataaccacgcgggttcgtcaaccagctccgcgccggcgggcagggtagggccatcatttaaggttacgccattgcgcaaggcttcaagtgcgtcttgtgtgggaataccttccacctgcacataatagatttttccggtgcgtttacccggctgggttaaacgcgcctgcaacgcgccgttattggtcagcaccagcaacccttcgctatcgcggtcaaggcgacctgctgcataaacaccctgaaccgggatgaattcttttaatgttttgcgtccggcttcatcggtgaactgcggaagaacatcgtagggtttattgaacaggatcacacgcgtgggctggttttcaggtttacgcctggtagaacgttggctgctgaatcgcttaacctggtgatttctaaaagaagttttttgcatggtattttcagagattatgaattgccgcattatagcctaataacgcgcatctttcatgacggcaaacaatagggtagtattgacaagccaattacaaatcattaacaaaaaattgctctaaagcatccgtatcgcaggacgcaaacgcatatgcaacgtggtggcagacgagcaaaccagtagcgctcgaaggagaggtgaatggaaagtaaagtagttgttccggcacaaggcaagaagatcaccctgcaaaacggcaaactcaacgttcctgaaaatccgattatcccttacattgaaggtgatggaatcggtgtagatgtaaccccagccatgctgaaagtggtcgacgctgcagtcgagaaagcctataaaggcgagcgtaaaatctcctggatggaaatttacaccggtgaaaaatccacacaggtttatggtcaggacgtctggctgcctgctgaaactcttgatctgattcgtgaatatcgcgttgccattaaaggtccgctgaccactccggttggtggcggtattcgctctctgaacgttgccctgcgccaggaactggatctctacatctgcctgcgtccggtacgttactatcagggcactccaagcccggttaaacaccctgaactgaccgatatggttatcttccgtgaaaacagcgaagacatttatgcgggtatcgaatggaaagcagactctgccgacgccgagaaagtgattaaattcctgcgtgaagagatgggggtgaagaaaattcgcttcccggaacattgtggtatcggtattaagccgtgtagcgaagaaggcaccaaacgtctggttcgtgcagcgatcgaatacgcaattgctaacgatcgtgactctgtgactctggtgcacaaaggcaacatcatgaagttcaccgaaggagcgtttaaagactggggctaccagctggcgcgtgaagagtttggcggtgaactgatcgacggtggcccgtggctgaaagttaaaaacccgaacactggcaaagagatcgtcattaaagacgtgattgctgatgcattcctgcaacagatcctgctgcgtccggctgaatatgatgttatcgcctgtatgaacctgaacggtgactacatttctgacgccctggcagcgcaggttggcggtatcggtatcgcccctggtgcaaacatcggtgacgaatgcgccctgtttgaagccacccacggtactgcgccgaaatatgccggtcaggacaaagtaaatcctggctctattattctctccgctgagatgatgctgcgccacatgggttggaccgaagcggctgacttaattgttaaaggtatggaaggcgcaatcaacgcgaaaaccgtaacctatgacttcgagcgtctgatggatggcgctaaactgctgaaatgtagtgagtttggtgacgcgatcatcgaaaacatgtaatgccgtagtttgttaaatttattaacgggagcgtaacgctcccgttgttttttgttaggctgctaacggttatcaaaattttatcaaaaaaagttatcaaaacccctcggtagttttggggtaggctggccggtcaggtggtagttctactactagtctcccacatagatattccttagctttttattattgctggcggacgctcgttaatatttaaggtcttcattgattaagacatccccaaagttagttatgtattcactgttattaggacaattatgaattaccactccttacacccgctcaaatattgttaaattgccggttttgtatcaactactcacccgggactcgccaggggacagccaacaggcattgggtgcaatcaccttagcgttcaggtacatgcggaatgtaaaaaaggccgcgagcgcggccccttcacatacatctttagtactgagactgtttaacctagggaattattatcgtattatattgcattacaactcccaacagtgacatatgaacttcctgctttactccacgactttaatatttcaaggccatgtgaagaacatatttcttgcactgcgagttcatcgagtaatccatagtaagaaacactttttgaatttttgtaaatgtatccgtaaagatgttttcttcctgtttcgtattttttgaagtatgagcttttatattgatttacaataagagtctcacctcctgattttagtaatctcttgatgctaagaactatcagataattcaaagcgtggctgtgatgataggaattatgttttttacgtgaatgagaataatcttaaatgaggaataactcattgattgacaatatttttattcaagaagtgtcattgactgttaacgcaatgttgtaaaggtaagataatctgatttatcaatattattgtgtgatttttatgtgagcagaagatattcatcagcaacgattacattagtcattttattttgccgacggcctcattgtcgaaagataagcgtacgacagtattatcagaaaagagtgattttttatccaactacacttcagcgcactgcgtgtaaaaaatgcctctttcttatgcgggatatcatcatttcatcatgatgtctttggtgagcggtgaacacaatgcacctgcgctgtctcttcaggatgaatcccctggtctggtgcctgcgggctgatgttgcagcagagcttaggagtcttagacgctactatcatttatccaatggcatggaaagcaaaagtgtcgatacccgcagtatatatcgtgaactgggtgcaacgctgagttacaacatgcgcctggggaacggtatggaaatgaaccctggctgaaggcggctgtgcgcaaagaatttgtcgatgataaccgggtgaaggtgaataatgacggtaatttcgtcaatgatttgagcggcagacgtggaatataccaggcagctattaaagccagtttcagcagtacgtttagcggacatctcggggtggggtatagccatggtgccggtgtggaatccccgtggaacgcggtggctggtgtgaactggagcttctgaccatcaacgattaaactgcgcttcggcgcagttttcgtttacaggatgttgaaagggaaaattctggggcaaaaaaagcccgccagttacggcgggaaacctcatcctatgggagaacaatgaataatgaaattgcggggttatcatctcccagtatatccatactaacaataaggttatttactcaaccaggcataaacattttgttttgtgcgtgggaacagccttaaggtgtaaagggggaggtggaaatagcaatgaggagtatcagcaagaatactcgccgctttaccacaacgtggatgagagggatgaaaaactcaaggcagagataactctgccttgaagataaatgcgcttttacagcgggcttatttcagctcttctgcttccggtaaggtcacgttcagctcaagaatagaaatatcgccatctttttgctcaagctgtacggttaccatctcaggatcaatttgtacgtatttacaaatgacctcaagaatatctttacgcaactgcggcagataatgcggttctgcatcgctgcgacggcgttcagcaacaataatctgcagccgttcttttgcaatgttggctgtgtttttcttccggctgagaaagaaatcgagtaatgccataacttatcctccgaacaagcgtttgaggaagcctttcttctcttcttcaatgaagcggaaaggacgttcttctcccaacagacgttctacggtatctgcgtaggctttacccgcatcggcgttaatgtcgagaatgaccggttcaccctggttagaggcgcgcaatacactttgatcctctgggatcacgccgacgagtttgatgcgcaggatctccagcacatcttccatgctcagcatgtcacctctgcttacgcggcctgggttatagcgcgttaacagcaggtgctctttaataggctcttcgccattttctgcgcggcgacttttgctcgccagaatgcctaaaatacggtcagagtcgcgtacactggagacttccgggttggtggtaataatggcttcgtctgcaaaatagagtgccattaacgcaccggtttcaatccctgccggggagtcacaaacgataaattcaaaatccatcgctttcagatcatcaagaactttggcgaccccttcacgggtgagggcatctttatcgcgtgtttggcttgccggcagaatatagagattttcagtacgcttatctttaattaacgcctgatttagcgttgcatcgccctgaatgacgttgacgaaatcgtaaacgacccggcgttcacaacccataatcaggtcgagattacgcaggccgatatcaaaatctatcacgacagttttctttcccttctgggccaaaccagtggcgatggccgcgctggaggttgtcttaccaacaccccctttgccgctagtaacaacaataatgcgtgccatagaaattccttgttaaaaagggatcaatttaacggttgaacggtcaaagcgttttcgactaactgcagtcgcgccgctttgccataaaattctgctgggatttgatcactcagccagtattcacctgcgatggacaccagttccgccatcaggttcgtacaaaatatttgcgtttcccggtcaccacttgcccctgccagcgcacgaccgcgcatcatgccatagacatgaatgttcccatcggcaatcaattcggccccagcgctaacgtggcttgtaacaatcagatcacattgtggagcataaatacgctgaccggaacgcaccggggtatctattaaacgcgtttttgtgaccggcgttgtattttgcgctggagcctgcggtgtgggagctggacgtggcgctttttcctttccttccgtcaggataggcagccccatcttttcaatttcggctttaagttgcgcatctttgcagccacttacgccaataacccgcaaaccggttgcgctaaccgccttatgcatcgcactccagtttaccgggtcttccagtgcactgacgttgagtacaacgggggcatgttttaaaaatgcgggggcctgagcgattttgtcttccagcgcctgatggataaccttaggttctgcctcatgcagatgaaccacagataaagtgaagctactgcctttaagctcgattggcgtgttactcatcctggccttactcaattagctattaatcatcgccagcgcgcgatgatgttccgaagactataaggcatgttatagtctggattatattgaggcaagtcaccctcccatttattcagagtaaaagtctattctgtgataaatggcgctgattcatagcttaaaaaatacccttgtcaatcaacccattgccgtcgtacttttgattgttcttatttacgcttcctttttccgcaccctaatcgtgacagcatctccagacctgtttaaatatccagtattgaggcaagtgtattttttcaccacgccaggctttcttaactttccattttttgcggcatcattaaagaacagatacccgttatcttaatatccgccacagaattgctctatcatagaaaccgcagaagacgtctgatacttctgtcaggtcatcgtaactcgtccaggtcagcggttttgattacggattgatgatgaaatgagcataagtgttgtacggttggattatcaggatgtgctatgaatatgatgcgtattttttatatcggattgagtggtgtggggatgatgttcagtagtatggcgtctggaaatgacgctggcggacttcaatctccggcgtgcggcgttgtttgcgacccgtatatttgtgtgaacagtgatggcatttccccagagttaacaaggaaatatctcggcgaaaaagccgctgaaaacttacaaagtttacaaggctacgatcccagcgaatttacattcgctaacggtgtattttgcgatgttaaagaaaaattatgtcgtgatgatcgttattttggtgtggatggtaagcggagtggaaaaatcaatcaaaccaccacaaagatgttatttatgtgtcgtgagtgatgtcttgtttacattatgttctattcgtcattaacctcttgagcgacagagaggagtggggcattaacgtttatgacggggagagtccccgtcggttgacatttacttaatttgaatatcgacgttatattttttagttttgtttttacgggcgtcgtttcgggtttgcaacactcgcagctcatatttgccagaagcagggagactgtattgtccgtgactatcgagttctggggaatatctggataaatcaacactatcatcgattcctggcccgaagaggtaagtatcagcgccttcattagagatactcacatgcactttctgaccttttttggcatagaaggtatatgtatcgtaatcgtatccctttatttcgccggagtactgagcgctgctatggccttttctgaactcaacattgacattcttacccgcagcaaagctcgtggaggttagcagtgcaagcagcaatacagccttcctgatgctcttgattttcattggtagtctcctgttcagaatgagtacgatgaactgttataatataacaatccctaacgggagaattccagtggctttcctgcgttcggtaaaatcacgttgcggcatttttgccggggggattacttataaagggggcatggactcaacaaaccgtagaaatctacagctggctggcttgtggcgcgggtttcattgatgttagcttatgccaaaacctggcatcttaaagagtaaaagtatgttttgtgtgatttatcgaagcagcaagcgtgaccagacctatttatatgtcgaaaaaaaagacgattttagccgtgttcctgaggaactgatgaaaggttttggtcagcctcagttagcgatgattctgccgctggatgggcggaagaaactggtcaatgccgatattgaaaaggttaaacaggcattaaccgagcaaggttactatttgcagttaccgccaccacccgaagatttgctgaagcaacatctttccgtcatggggcagaaaacagacgacactaacaaataaccgatatccggcggtggcattatctttgtcggcgcgggttttcatatccacgataaggtgaggggaacgttatgtatcaacatcacaactggcaaggtgcgctgctggattatccggtgagtaaagtagtctgtgttggcagtaactatgccaaacatattaaagagatgggcagcgcagtgcccgaagagccagtgctgtttattaaaccagaaacggcactgtgcgatctgcggcagccattggcgatcccatccgatttcggtagtgttcatcatgaagtcgaactggcggtgttgattggcgcgacactgcgtcaggctacggaagagcatgtccgcaaagccattgccggttatggcgtggcgctcgatctgacattgcgtgatgttcagggaaaaatgaagaaagccgggcagccgtgggaaaaggctaaagcgtttgataactcttgtccgctttccgggtttattcccgcggcggaatttaccggcgacccgcaaaatacaacgctgagcctgagcgtaaacggcgaacaacgccagcaaggtacgactgcggacatgatccataaaatcgttccgctgatcgcttatatgagcaagttttttaccctcaaggccggtgacgttgtgttgacaggcacgcctgatggcgtcggcccgttgcaaagcggtgatgagctgacagtcactttcgatgggcattctttgacaactcgcgttttgtaatactttttgccgcctgaaagcggcggcaaaacttgcatcgctgtgccagactggttataaggtgcgttttaacgtaatggcggaacacctgatgagcgatgtacctttctggcaaagtaaaaccctggacgaaatgagcgatgcggaatgggagagcttgtgtgatggttgcggtcagtgttgcctgcataaactgatggatgaagacaccgacgaaatctacttcactaacgtcgcctgtcgccagctcaatattaaaacctgtcaatgtcggaactacgaacgtcgtttcgagtttgaacccgactgcattaaattaacccgtgaaaatctgccaacattcgaatggctgccaatgacctgcgcttatcgtttgctggcggaaggtaaagatttacctgcgtggcatccgctacttactggtagcaaagcggcaatgcatggtgaacgtatctctgtgcgtcatatcgcagtgaaagaaagtgaagtgattgactggcaggatcatatcttaaataaacctgactgggcgcagtgataaatttaatagatgctgatgggggctttcttaatatacgtctggatgctcgccatttcgtagccctgtttttgaaagcgctctgtcataatgagagttacccgataccttattatcaacaggtaactctcaatctttaaaaaacgtctgtgtttttaaatgtgataaaccttataccttgagtacatggagagaataatcgcttatcagacttcaggtacctcaaagagtgtctttttaccgtgtcttttctgatactcattacaggtgttaatcatttttttggccgcttcttttagcaaagaaagcattaaatcatcataatcaacgtagaatctggttgtttcagtttccgtttttatctcaccgatggcggctatttcggtggttaatttcaatttggcggcatcgatatctttattcgcttgtttaaccgtgttagacagggtggtaaagaaattctgcacagattttaacttgttcttcaattctggaatcagttttccttcaactacgcccgcagcaatagaataggaaatgattaatccaaatggaccggcgacgacaccggctgcggcaccggcatatgcttccttcctgattttatctacctgactctggaaatagctgcttttttcactaaaatcattggttaactggctatctaacgccagcagtttcccggaagcgttgttgaaactttgactgcttaccagcagggatttttgcgcttcattcagcttcgtgatgccgtcatccagtaccttaatgagaatgtctttctgggcggatgctttcttctcattgtactcatcaaatagcaaaatatacgctgcgagcaattgcgtcgcaacaccacaccattcatacactgtttgggttgcttcaaaatacttatcctggctatccataagtaaggttttaatatcgccgactaaaacggaggctgcctgactatactcctgtttaaagcgacttaactcttttatggtttcatcaaaggtctgccaggggatgacctgatcgagatatttattataaagatctaatgctccatctgcggtttcgattgcgtttttaactacttctaccgttttatctgcaacgatttcagtcataatcattcgcctctttaaatatataaattgtaatgaaactcctgttttacaactattaataaattttacttcatctaattcatagttagccgggcgggatgcgtcaatgtctttatttctattaatatgataaatatcaaacaatgtttaatgtcattatggcgaatgcttctattctattttttagccgggtgatatttttcatttctgctggatgagcgtcgtcgccagaaggccacgtgagcacaagataagagaacgaaaaatcagcagcctatgcagcgacaaatattgatagcctgaatcagtattgatctgctggcaagaacagactactgtatataaaaacagtataacttcaggcagattattatgttgtttatcaagcctgcggatctccgcgaaattgtgacttttccgctatttagcgatcttgttcagtgtggctttcctagtccggcagcagattacgttgaacagcgcatcgatctgaatcaactgttgatccagcatcccagcgcgacttacttcgtcaaagcaagtggtgattctatgattgatggtggaattagtgacggtgatttactgattgtcgatagcgctattaccgccagccatggtgatattgtcatcgctgctgttgacggcgagtttacggtgaaaaaattgcaactacgcccgacggtacagcttattcccatgaacagcgcgtacagccccattaccatcagtagtgaagatacgctggatgtctttggtgtggtgatccacgtcgttaaggcgatgcgctgatgtttgccctctgtgatgtaaacgcgttttatgccagctgtgagacggtgtttcgccctgatttatggggtaaaccggtggttgtgctaagcaataatgacggttgcgttatcgcccgaaacgctgaggcaaaggcgcttggcgttaaaatgggcgatccctggttcaaacaaaaagatctgtttcgtcgctgtggcgtggtttgctttagcagcaattatgagctttacgcagacatgagcaatcgggtgatgagcacgctggaagagctaagcccccgcgtcgagatttacagtattgatgaggcattctgcgatctgacaggtgtgcgtaattgtcgcgatctgactgattttggcagagaaattcgcgcaacggtgctacaacgtacccatcttactgttggtgtggggatcgcccagaccaaaacgctggctaagcttgccaatcatgcggcaaaaaaatggcagcggcagacgggtggggtggtggatttaagtaatctggaacgccagcgtaaattaatgtctgctctccccgtggatgacgtctgggggattggacggcggatcagcaaaaaactggacgcgatggggatcaaaaccgttctcgatttggcggatacagatatccggtttatccgtaaacattttaatgtcgtgctcgaaagaacggtgcgtgaactgcgcggcgaaccctgtttgcaactggaagagtttgcaccgacgaagcaggaaattatctgttcccgcagctttggtgaacgcatcacggattatccgagcatgcggcaggccatttgtagttacgctgcccgggcggcggaaaaacttcgcagcgagcatcaatattgtcggtttatctccacgtttattaagacgagtccatttgcgctcaatgaaccttattacggcaatagcgcgagcgtaaaactgctgacgcccactcaggacagcagggatatcattaacgctgctacgcgatctctggatgccatctggcaagcgggccatcgttaccaaaaagcgggcgtgatgctgggggatttcttcagtcagggagtcgcgcagctcaatttattcgatgacaacgcaccgcgccccgggagtgagcaattgatgacggtaatggatacactgaatgctaaagagggcagaggaacactctattttgccgggcaggggatccagcaacaatggcagatgaagcgagccatgcttagtccacgttatacaacgcgaagttctgatttactgagggtcaaataaatatagcggcaggaaaaaagcgctcccgcaggagcgccgaatggattagcgaccgaacagatcacgttttttcgctttaaacggctgggaaatcaccaccagcactgcgacaatcaggtaagcgataaaaataccgagcagccactgcggcatttccagacctaaaaaatcccactgacgctcggcgcaatcgccagaggcgacaaacacttgcggcacccacttatccagcggcagccattccgggaaacgaaccataaaatcacaggtggcaaacgggctaggatagagctgaagcatggtgtgctcgtaagttaactgcacaccgcggaacgcactatacaaccagataaccatcgctacataacgcagcggagttttcggggcgatcgcgccaatcagcgcagcacccagaacgccgaataacgcgcagcgttcataaatacagagcacgcaaggtttcagtaacatcacatgctggaaccacagcgccgtcagttccagtgccagagcagtaaacgccatcaacagccacgcgccccggccttgactacattggttcaaaaatcgcaacataatcatttccctgcaatatgcatagagtgcgcagtttaaaccaattcattcgctgcgccaccaggaggcagcaaaaataggacgcaattggacaattatcgggcgaaaaggcaaaccgggcatttatatgcccggtaagttgttatcaaagcgttgctatccagcccatttgcataaaccattcggttacaggggcaagcgtaaactcgacgcagagcaagccgacgagtgtcaggacgagggtgtaaggcagggccatccacaccatgcggccataagagaggcgaatcaatggcgcgagtgcagaggtcagcaggaacaggaacgcagcctgaccgttcggcgtagcgacggagggcagattggtaccggtattaatggcgaccgccagcagctcgtattgcttcaacgtgatagcgccactttccattgccgctttcgcttcgttgatataaatcgtccccacgaagacgttatcgctaatggaactcagcagaccgttgaaaatatagaacaggctcagctgagcatgttcgcttgcctgcaacacaaactgaataattgggctaaacagttgttggtcgataatcaccgcgactacgctgaaaaacaccgtcaacagtgcggtgaatggcagagattcggtgaaggctttaccgatagcatgctcatcggtgacaccggtcaaacttgttgccagaataatgacactcaaaccaatcaagccaacttccgccagatgcaacgccagcgcagtcaccagccagacgccaataatcgcctggacaatcagacggattttatcctgacgggtacgctggtggcggctttgatcgtcaaactgttgcaacacttcgcggactttctccggcagcgtttcaccgtagccaaaccaacgcagcttctctaccagcaggcaggttaacaggccacaaatcagaaccggaacggtcaccgggctcatgcgcaggaagaaatcgccaaaatgccagccagccgctttagcgatgatcaggttctgtggttcgcccaccatggtcattacgccgcctaatgcggtgccgacaccggcatgcatcatcaggctacgcagaaagccacggaactgttccagaaccactttgtaatgcttgtcgatatgactatcgtcttgcaggtcggtgtcttcggtacgggaagaggctacgcggtgataaataccataaaaaccgactgcaacgctgatcaccaccgccacgacggttaaggcatcgaggaacgcggagaggaacgcagccgccacgcaaaaagagaggctcagcagcattttggagcgaatgcttaacagcaaacgggtaaatatgaacagcaacagctgtttcataaaatagatacccgccaccataaacatcagtaacagcaagacttcaagatttgccgccacctcttcacggacgtgttccgcgctggtcatgccgatgaataccgcttcgatagccaacagaccaccggggagcagcgggtagcatttcagggccatcgccagagtgaaaataaattccgctaccagcaaccagcccgcgacgaaagggctgatgaggaaaattaacgggtttacgattaagaaaatgatgagggcgagtttgtaccagtcgggggactggcccaaaaaattgcgccatagcgcgcggccccaggagatctccatgatggtttcccttaccttacaaataatcaatgatgtttttatgtttaaacgcaaagcttaacggtcaggcaggagtgaggcaagtcttgatagtcaaggggaaagagatgcggaaaatgaagccttgatccctttttcttctttttgtctgctatcagcgtagttagccctctggtatgatgagtccaactttgttttgctgtgttatggaaatctcactatggtcattaaggcgcaaagcccggcgggtttcgcggaagagtacattattgaaagtatctggaataaccgcttccctcccgggactattttgcccgcagaacgtgaacttagtgaattaattggcgtaacgcgtactacgttacgtgaagtgttacagcgtctggcacgagatggctggttgaccattcaacatggcaagccgacgaaggtgaataatttctgggaaacttccggtttaaatatccttgaaacactggcgcgactggatcacgaaagtgtgccgcagcttattgataatttgctgagcgtgcgtaccaatatttccactatttttattcgcaccgcgtttcgtcagcatcccgataaagcgcaggaagtgctggctaccgctaatgaagtggccgatcacgccgatgcctttgccgagctggattacaacatattccgcggcctggcgtttgcttccggcaacccgatttacggtctgattcttaacgggatgaaagggctgtatacgcgtattggtcgtcactatttcgccaatccggaagcgcgcagtctggcgctgggcttctaccacaaactgagcgcgttgtgcagtgaaggcgcgcacgatcaggtgtacgaaacagtgcgtcgctatgggcatgagagtggcgagatttggcaccggatgcagaaaaatctgccgggtgatttagccattcaggggcgataatcccttccgtttaaagagcaaacccctcaaacgaggggttttttgttgtttttacagatttcccattcttggcgggcaacgttccagcaactcgatgctgccgtcttcgttttgctgttcgagcatcacatcaaatccccacaggcgatgcacatgcttcaggacttctttgcgcccccgatccagcggtgcgcgattatgtggaatataacgcagcgtcaggctacggtcgccgcgcaaatccacgttccagatctgaatattcggctccagattacttaagttatattggctgcttaaccggttacggatctcccgataaccttcttcattatgaatagcggaaatctccagataattatgccgatcgtcatccagcacggtgaagaagcggaaatcacgcatcactttcggactcaggaactggctgataaaactctcatctttgaaatcacgcatcgcgaaatgcagcgtttccagccagtcggaaccggcgatatccgggaaccagtatttgtcttcttccgttgggctctgacaaatccgtttaatatcctggaacatggcgaacccgagggcatacgggttgatgccgctgtaccacgggctgttataggggggctggaagaccacattggtgtggctgtgcaaaaactccagcataaaacgttccgttactttcccttcatcatacagatggttaaggatggtgtagtgccagaaggtcgcccagccttcgttcatcacctgagtctgtttttgcggataaaaatactggctcaccttacgcacaatacgcaggatttcacgctgccaactttccagcagtggcgcatttttctccataaaatagagcaggttttcttgtggttcggacggatagcggcgcgcttcagcaaccgttttctcttcctcgcgcttcggcagggtacgccagagcatattgacctgactttgcagatactcttcgcgacttttctgccgggctttctcttcttgcaggctgattttttgcgggcgtttgtaccggtccacgccgtagttcatcagcgcgtggcagctgtccagaagccgttctacttcatcaacgccataacgctcttcgcactcggtaatatatttacgggcaaaaatcagataatcgacaatgctactggcgtcggtccagctacggaataagtaattgtttttgaagaaagagttatgcccatagcaggcatgagccatcaccagcgcttgcatggtaatggtgttctcttccatcaggtaagcgatacacgggttagagttaatgacgatttcataggccagtccttgctgaccgtgcttatacagccgttcagtctcgataaactttttaccgaaactccagtgcggatagttaattggcatgccgacgctggagtaggcatccatcatctgttcactggttatcacttcaatctggtgcgggtaggtatccagccggtagagtttcgccacccggtctatctctgccagataaacatccagcaggtcgaacgtccagtcgggtccatcgctcaaacgtgtggtgtccttattcatagaatcgatcgtcgccatacgcgcacctcattgttgtcggcgctctctgtgtggagcacctcatttcaagcatagaacacctgttaaaaaccgcgtcgccggagaatttttttctttgcgatttcttattatcagagtgccactaatccgcttctgaacggaattttatgctggataaaaagggcgttcagcaggagatactaaagacgccatattgccgcagagtcagggagatgtgagccagctcaccataaaaaagccgcatgttgaataatattttcaactgagttatcaagatgtgattagattattattcttttactgtatctaccgttatcggagtggctatgcgagttgtcatactgggaagtggtgtggtaggcgttgccagcgcctggtacttaaatcaggcaggacatgaggtcaccgtcattgatcgggagccgggggccgccctggaaaccagtgccgcgaatgccgggcaaatctcccccggatatgctgcaccgtgggcggcaccaggtgtgcctttaaaagcgattaaatggatgttccagcgccatgcgccgctggcggttcgtctcgacggtacgcagttccagttgaaatggatgtggcaaatgttacgtaactgcgacaccagccactacatggaaaacaaagggcggatggtgcgtctggcggaatacagccgtgattgcctgaaagcattgcgcgccgaaaccaatattcagtatgaagggcgtcagggtgggacgctgcaactgttccgtaccgaacaacagtatgaaaatgcgacccgcgatatcgccgtgctggaagatgccggcgtaccgtatcagctgctggaatccagccgcctggcggaagtggagcccgcgctggcagaagtggcgcacaaactgacgggcggcctgcagttacccaatgatgaaaccggagactgtcagctatttacccagaatctggcgcggatggcggagcaggcgggggttaaattccgctttaatacgcccgttgaccaactgctttgcgacggcgagcaaatctacggcgtgaagtgtggcgatgaagtgattaaggccgatgcgtatgtgatggcgtttggttcttacagcacggcgatgctcaaaggcattgttgatattccggtgtatccgctgaaaggctacagcctgaccattccaattgcgcaggaagatggtgcgccggtatccaccattcttgatgaaacctacaaaatcgccattacccgtttcgataaccgcattcgtgttggcggaatggcggagattgttggttttaataccgagctgttgcaaccgcgtcgtgaaacgctggagatggtggttcgcgatctctatccacgcggcggtcatgtcgagcaggcgactttctggactggtctgcgcccgatgacgccagacggcacgccggttgtcgggcgtacacgctttaaaaatctgtggctgaataccggtcacggcacgctcggctggacgatggcttgcggttccggtcagttgttaagcgatctgctctctggtcgcacgccagcgatcccatatgaggatctaagcgtagcgcgctacagccgtggatttacgccaagtcgtccgggccatttacatggcgcacacagctaaggaaacgagatgacccgtccgatacaggccagcctcgatctgcaggcattaaaacagaatctgtccattgtccgccaggccgcgacgcacgcgcgcgtctggagcgtggtaaaagcgaacgcttacgggcatggtattgagcgtatctggagcgcgatcggggccaccgatggctttgcattgcttaacctggaagaggcaataacgttacgtgagcgcggctggaaaggaccgatcctgatgctggaaggatttttccatgctcaggatctggagatttatgaccagcaccgcctgaccacctgcgtacacagcaactggcagctcaaagcactgcaaaatgcgcggctaaaagcaccgttggatatttatcttaaagtgaacagtgggatgaatcggttgggcttccagcccgatcgcgtgcttaccgtctggcagcagttgcgggcaatggcgaatgttggcgaaatgaccctgatgagccattttgccgaagcggaacatcctgatggaatttccggcgcgatggcgcgtattgagcaggcggcggaggggctggagtgtcggcgtagcttgtccaatagcgcggcgactctgtggcacccggaagcgcattttgactgggttcggcctggcattattttgtatggcgctagcccgtccggtcagtggcgtgatatcgccaataccggattacgtccggtgatgacgctaagcagtgagattattggtgtccagacgctaaaagcgggcgagcgtgtgggctacggcggtcgctatactgcgcgcgatgaacagcgaatcggcattgtcgccgcagggtacgccgacggttatccgcgccacgcgcctaccggtacccctgttttagtggacggcgtgcgcaccatgacggtggggaccgtcagcatggatatgctagcggtcgatttaacgccttgcccgcaggcgggtattggtacgccggttgagctgtggggcaaggagatcaaaattgatgatgtcgccgccgctgccggaacggtgggctatgagttgatgtgcgcgctggcgctacgcgtcccggttgtgacggtgtaacttgttgtaagccggatcggaggcaacgtcttctgggtgcaaaaaaatcatccatccggctggtcagcaactgtagttgttaatgtgacagagccattgcccatgatagtgtccattaaaaggatggacactatttccccggaacctgaactcaccgcacaggcgttctacataaaacgcttacgcttcattgttgactcgaactcgacttcagataaatcacgctttacccttgatggagcctgtacatagatttgtgtaattgcctgattttgatatgttcaattcaacatcaaatgaaggttaaattatggacgacaaacaattgcaggctcaggctgcgttcagcaaagcatcgcaaccggcgatagatgcttcattaaatttaagattcagcttcctcttcagccacccgtacgccaatcttcaacacttcattatcttctttctcggccaccgtccagatcatcccggcaaactctacctggtcaccgacaaccggtgccgcgcctaacaactgctggacaatttcacccagcgtttgctgcttatcacgatattctcgcccgtcttccaggccatatatcagcgcaacatcagcatatttggcgctggcttcgagaatgaagtcaccaaagaagcgttgatccagcgcgaccggcgggctctggctgaacagtttaccgagcgccggaagatcgcgttcccgaccaattacacacaacacatcgccttcgcgcagtcgggtgctgccggtaggatgaagcaactggttatcacgaaacagtgccgcaatacgcgtctcttttggcatatgcaaatcgcgcagtgccgcgcccacgcaccatttatcggcactcaattgataaacaaactgctcccacggattttccggatgaatatccaggccaacgcgactcaccggacgtcccactggcggaaccaccactttggcttttttagccgcccagctgagacttgttccctgcaagagcagactaaccagaaccacaaagaaggcgacattaaagaacagacgtgcattctccagccccgccatcatcgggaacacggccaggatgattggcaccgcgccgcgtaatcctacccagctgataaacacgcgctcacgcagattgaaaccgcggaaggggagcaatccagcaaatacgctaaggggacgggcgaagaatatcatccatgcggacaaaatgagcgccggaatggcaataggcagcagatcgcttgggttaaccaacagccccagcaccaggaacatggcgatttgcgccagccaggcgaggccgtcgaaattttgcaggatgccgtagcggttgcgaatagggcgattacccagcagaaaaccgcacagatacaccgccagaataccgctaccttccagcgcagtagttaaactgaaaatcagaataccgccacttaatgccagcaatggatataatccggcgggcagggcgatgcggttgatcatttgcagtagtaaataaccgccgccaagacctattacaatgcccagaccaaattgttgcagaatatcgacaatgaacatccagctaatattgctctcatgatgctggatcatcgcaattagggtaatcgtcagaaagaccgccattggatcattactgccggattcaatttccagcgtgctgccaacacgttcgttaagccccttaccacccagcagagaaaagaccgctgcagcatcggtagagccgacgatagcgccgattaataagccttcaatcaaatcaagattaaacagccacgccgccatcatgccggttaaaccagaggtgataagcacgcccagcgtcgccaggctcagtgccggtcctaacgccacacgaaaggaactggcctgagtgcgcatcccgccgtcgagcaaaataatcgccagtgccaggttacttaccatgtaggcgaaggggtaattatcaaacgggataccgccgacgccatcgactcctgccagcatgccgatcgccagaaaaataaccagaataggaatgccaagacgggaagaaaaactactaagtaatatactgctggtgacaaggatggatcctaagatgaaaaggctaattattgttgtggcatccaacggtcggttactcctgattacgctgtctcttatataaaccctaccatattagcggcagagacagcgttttacttagccctgaagcgtgatttttttacattttaagaacaggatgaccgctaatcgtcaactgagtgccttcccgggtgttattcagaatggcatgtgcgcccaacggcagcgtaaccgtgcgttgttcatgaccaaaatcgaggccggtaatgagtggaatgctcaggcgggaacgcaaaaacgcgtacacactctccaggttgtaacctgcgtcataatcattgggcgtgctgccgctaaagctaccgagaataatcgccttctgacgtggcaaaattcccgcatgatagagctgcaacagcatacgttcgacccggaaagggtgctcgttaatatcttccagcaccagaataccgttctcaatttttggcatccacggtgtaccgatcagactaatcagcatcgcaagattgcctccccacaacgtgccttcggcccgacatgtcgggccttccccttgccattcaatggtgaaggtttcattgcgtaacgccagccagaaatggtgctcggtaaaggcgttcagttcatccgcgccaaagtttgctaccagcatggggccgctaaaggtgatgacattgccatgcgccagaagaccgcactgaatggcggtaaaatcgctatgtccgcaaatgagcaacgggtcatgttgttggcgagccaccagtgcctgccagtcaatatctgccagtaaacgactggcaccgtaaccgccgcgtacagccagcacgatggtgttgggggtagtcagtctggcaagggaattgagatcttccagacgctctgtttccgtacccgcaaaacgctcacaacgacgggcaataacctcgacgttattgacttgatgccccgcgtcggtaaggcgctggataccacgcagcgcggcgtgctgtttaatgcagtaaccgcttggggcaattaagtgaaacagagacatggcaattccttgctgacaacagaaacgaaatgtatatcatgccgcttaggtgtgccgttgtcacctcaacggcgattccaggctataaggatagaagaagtgaaattgagatggtttgcctttttgattgtgttattagcgggttgtagtagtaagcatgactatacgaacccgccgtggaacgcgaaagttccggtgcaacgtgcgatgcagtggatgccaataagccagaaagccggtgcagcctggggcgtcgatccacaattgatcacggcgattatcgctatcgaaagcggtggtaatccgaacgcggtgagtaaaagcaatgccattggtttgatgcagttaaaagctagtacctccggacgtgatgtttatcgccgtatgggctggagtggtgagccgacgaccagcgagctgaaaaatccagagcgtaatattagtatgggggcggcttacctgaatattctggaaaccggcccgctggcaggcattgaagatccgaaggtactgcaatatgcgctggtggtgagttacgctaacggggcaggtgcgctgctacggactttcagcagtgatcggaaaaaggcgatcagcaaaatcaacgatttggatgctgacgagttcctcgaacacgtagcgcgaaatcaccctgcgccgcaggctccgcgctatatctacaaacttgagcaggcactggacgcgatgtaaatcagtcgcgcactttgtccgctttttcccgggcttctcgctcgagagagaaaataatccgctgtaattgccgctccaccgtcgggctgacgttaagaaaacggaagctcagacggggagtggtgatggtttcattcttgccatcaatcactttgcgctcgctgatggagattaactgggcgtcaaagtgaaaaacaccccattgccccatgttgacttcaatctgagcgaagcgcatgccttcttgtaattcggcaggctttgctgtttccagtaatgcgcccatgccgcctaagctcaaatcatacaggcggaaacgtaacgtactgttatccgccagtttggtctggcaaaaataaggcggatggagtggggcggagatgcggaaatatcggcgtcgttgtacaaaccataaggtgggaggcggtacggtaataaatgccggaagctgcaagtattcactctgctgtagttgttcaacagtaaactcgactttcgcaccctgagtttcggcggtaatggtaatgtgctgtgcctttagcacggcgatgttgtcttcggcttgactgccgaaatccagcaccagtttatccggggttattgccagtaatttgctgatcagctgcccgccattccaactgagacgcaaaggaattgcggctttgtgcaaatcgcgtaacacgcccaggacggctaacggattttgtttcaggaactgctcatggtaatgactcacgcggaaaaactcctgactgacaaactgtctttggtttatcggtcacagttaacaaaacttaatacaaatgcgtgaatattttttacatgttgttcttaaatcagccgacatacgcccagcatcgatcccgcccttgcctatacttagagcgttgatgtaagcatttcttgcgtccgattcatcgaaacgagggcctgaacatgggaattattgcctggattatttttgacctgatagccggcattatcgccaagctaatcatgccggggcgtgatggtggtggatttttcctgacctgtattctcgggatagtcggtgcggtggtcggcggctggctggcgaccatgtttggcattggcggctccatcagtggttttaatctgcacagcttcctggtggcggtggtgggagctattctcgttctgggcatattccgcctcctgcgaagagaataagattttcataaggcggatagcgatacagatgccgctatccgctttcacatcagaacgtatactcgacacctgctttacgggtgaaaaaaatcaatatagcacttcgatatccgataaagtcggttcccggtaacaacaacagaatccttttttaattattgtttcgttgtttttggtgtgattcagaaaataaatattttagacagtagccagagtggcgttaaaaatggggcggatagtgaggcggttttggctgcgcttattgaacatttagaattgatcaatccttctggcagattaagccaaaatacccgtagcgcaatgcttcagttacgcgaagaggaatggtctgaattctttttttggttgctaaattctctggagtgtctggattatgtgattattaatttaactccagaaagcaaaaaaacgttgatgagtgaacaccgtaacaatattcaggtagcaattgatgctttatatagccaacgtcggcgtaaaagcccgggtgatgaaagtgaaacacttacccgtagaaatgacgctatcttcggcaaccacgtatggcaaacatttgcgcaatacttcccgccaggacttgaaaaaccgtctgtgtaaaaaaaaccatagctatggtgttatctgccgacaacgccatccggagaagccgaatgacgttgtcggagtaagcgctggttaaggtgtgggttgtgcctctttggtactgggttgcgtcgttgcactcttaacggtcggacgcgtcgccggaacattgtcacacggttgctctttcgggcagatcaaatccagcattttcagcgtcacgccattggtccagccaaagccatcctgtaatggatattcgccaccgccgccccccgttccggtggtgctgacatcatatttttccaccagctttttctcccggtcataggtgtgctgaacattggtcaggaagtgccagctaatgtccatcgccacctctttttgcccgtagttttgtaatccttctgtcgcgacccactgtaacggtgcccagccatttggcgcatcccattgttgcccacttttcacgctcgtggtgttcaggccgccgggttgcagcagatgtgttttcgtcgccgtcgccattttgttggcgcgatctttcgctgccgcattgacgtacagcgggaacagggcggccgcggttaactgattgcgcactttatgacttttcaggtcgtaatcggcataccagccttgttgatcgttccacaggtatttttcgatccctttttgacgggcatttgccagcgtttcgtactggtttgccatcgcgttatctccggcagctttgctggcgcgggcgaggattttttccattttaaacatcaggctgttcagatcgaccggtacgatgctggtggtgcgtaaggtatttaactgctgcgggttgtccatccagcggctgctgaaatcccagccagacgcagcggcagagcgcaggtcgcggtaaatttcagtggcaggtcgattcggattgcttttggcggtggcaatatcttccacccaactctctggtcgtggcgtatcgcgatcgtcccagtagcggttgagaagggtaccatcctgaagtttgacaacgcgtttttcctgttgtccggcttgcaggttttcaacaccgtccatccagtaagcatattctttttgcatttgcggcaggtattgcttcaacgcggcatcgccttcatgctgcgccagtaactctaccatcagggcaaagaagggcggttggctgcggcttaaatagtaactgcggttgccgttgggaatatgaccgtaagtgtctatttcatgagcaaaattggccaccatatccgcgactttatcccagtgaccgctttcggcaagtcctaacatggtgaagtaactgtcccagtaatatacctcgcgaaagcgtccgcccggcacgacataaggttccggcagcggtaacagagaatcccatttttcggtgttttcggtagaacgcgttaataccggccaaagtccgtcaatatgttcgcgcagactctgcccctctggcggaacatatttctcgccttctttcggcagggtgaaattgacgttaacgaaatggcgcagatcaaatccgctctggttttgctgcatccgataatcagcaaggatcatcagcggatcgctgttcggcacggcatcggcaaaggttttttggtccggaaaaagtttggcgttttgcacatcattaaacagcggccctaataaaatatcaggcggctgtggtgttaccggtgtttcttctgcctgcacgcttagcgcagcgaaacacaaaaagatacaggctggaattaacgccattttttgcgggcgagaaggtgcgggggatttcatcaatcattctcctttggcgaaaccgaataaaacggtattcaagtatcagaaaaccttagttcaggatcgcactagctgcatgatcgaaatctcattctgcgaactgtcaggcattttagaaaagggaattaaagggataaataacggcgaaatagagtgatcaaataacgtctgtttattagccagccagcggcgttgggttcgtgattagcgaagaaaaatcatcataaattggtgaaaaatataacaggtagttaaaaaccattagtgctgagtaaattgccggatgacatcagaacgatgccatccgaacagtggcttaaccctgacggttgaaacgttgcgttttaacgtccagcgttagcgtttcttctggttgtatcgcatacagtttctcaccctgctggcaaatccagccaatccccagttcacgggcgattagggcgctgtgggataccggacttccggcgctaaggcagataccttttacaaccgccggatccagttgcagtactgtggaaggataaatgttctccgccagtagaatagttgggctgttaaactgcgggagttcttctttcgtttgggtcaggtggaccagggtgcgatgcagaagatcgtccacatcaatatagcgagcttgtagatattcatcatccagttgctggtattgctggctaagttctttaagaacttgctgccaggcatattctgccgtgcaatgttcatgctgaaggagttcgcttgccgccgccagcagttccggatcatctaacagtgtatggtgaccagaaaagattgcggcaatatcgtcaagcccgctggcttctgctttcgctgttaacgtcatcagatctaataacgtgaagtcaatagcctggcgtaatcgatcttgttcttcttccacggtcagggtactttttgcctgtaccgtacataaaactggttgataataaaaggctttaccgctaacaggcggaacgggacgcagagtaggtggagcgacttcctccgtttcaccaaagttatcttcagccagctgacggaaagcgatcagtgcctcttcagcttctggccctttcgcaatcaggcgcagcgtatcgttatagcgaacttgtagtaacgcaatctggttaatactctctggtgtgacgcatttgccgtttttttccagcaacatatcggcattaaatgtgcttaaggtataaaccagccgggaggccggacgtacatgcaggccgttacggttttttatgaccaccgccagagaacgggcttcttcatcgtacgcaggacatgtgtcagagatttcagtgtcggaggacggtaaacccagttgttcacgtttggcttccagcgcatgcatggcgtcaaagataactttgtcgatatccgccccgctggccgcgctgaccgttgctgccagtgtaccttcgaccaacggcgcagcacacaaacgtacttttgcggcgatctcgggagccagcaattccagcgcagtttcagcactcaataatgcgctacccatatccatcatgaccagcacatggtcggcatcagcaacagattcgatggcctccatcactttgacggcatcggtaccaatgggattttgtggatcgtcaattcccgcggcaatggcgattttacaactatcactcattaacatctgacgggctaattcaccgacaccttctcccagtcggctgctatgactaactatgaccaggtttaccatcaccaattccttactcttttgcggctaacgccaacatttgcatcataaacatcacgctggtcgcgccgggatcctggtgaccaatactgcgttcaccgagataactggcgcggcctttgcgggcttgcatcgtaatcgtactttgtgcagcggattcggcgatgctactggcagcttcgagcgccaccggaacagagagattttgctcgctggactgacgtaagctttccaccaccggcacccacacatcacacatggttttatcgccaggttcggctttcccgcgactgattacgccgtccgcgccatcgcggaacatctgataaagctcttccagtgtcaggctttgccgtgcctgggtcgcctgtgcggcgcggataaagaaggtaccgaacagcggaccactggcaccaccgacgctggaaagcagcgtcataccggtattcttgagaatgaaaccgatatctttatctgcgatagcagggagtttttccaccactttgctaaagcctcggttcatatttagcccgtggtcagcatcgccaatttcgcgatccagtccggtaagatactcgctctcggtgctgaaaatatcgccacaacgagtgagccagttaacaatttgagttctgctcagactcattgctttctccttatttaccccagttaagggccggggtgtggaccggggcgtcccagagtgccagcgtttcgtcatcaactttcagtaaggtgatactgaaaccggtcatatccagactggtgcagtacgcgccaattaaattacgttcgatagtcaatcccgcttgctggcaacgtgtggtcaggcggttatagacgccgtacagctcagaaagcggagttgcgccaagattgttaaccagcgcaatcacccgatcgccagactggagcggttgtttggtttgttgttcttcctgccaactgccttgttgataatcccagaaacgcaaagtgcgatggtaactgccatttaccagcagggtgtcgaacatttcatcgacggtttgatcaagggaagagaaggggcggcggtcaatacccggctcaccatgaatgccgacgccaaactccatctcattatccgccagggtaaaagaaggtttgcccgcggcaggaacggtacaggcaccgagagcgatacctatactgtggccttgattattcagcttacgccccagttccgcacaggcgtccagactgtcgccacgctccgccgctgcgcctacgagtttttcaattaatacggtgttggcaacgccgcgtcgcccggcagtataaagactgtcttttaccgcaacgtcgtcatcaatgaccacagtggtcacttttacgccgctatcgtgcagtaactcggtcgctgtttcaaagttaagaatatcgccggtgtaatttttgataatcaacagtacaccttcgccgccatcaacttgcatggcgcattcaaagattttatcgggcgtcggactggtgaaaatttcgcccggacaggccccgctaagcatcccctgaccgatataaccacagtgcatcggctcgtgtccgctgccgccaccgctcagcagggcgacttttcctgcaacaggggcatcagctcgggtgacatacaccggatcctgatgcagtgtcaggcttggatgcgctttcgccagtcctgccagttgttcgtccagtacgtcttgcacatcattgatcaattttttcattattttgctccagcaattacggtagggcatggatgatgttcaacgacacggcgaccactgactgccgatgaatccattgtgcatcaggcaagggaaaagaaaattagcccaaattatgtttcatagtgaaacatatgctttaatgaatgttccatattgaaacttttacgtgtattaatacttaaaattgcgagccggaacaccttttgtcataagggatgcgggatatgagtggcgcttttaacaacgatggtcggggcatatctcccttaattgcaacctcctgggagcgatgcaataagctgatgaaacgggagacatggaacgtaccacatcaggcccagggcgtgacatttgcttctatttatcggcgtaagaaagcgatgctgacgctcgggcaggctgcgctggaagatgcctgggaatatatggcaccgcgagagtgtgcgctgtttatcctcgatgaaaccgcctgcattctcagccgtaatggcgatccgcaaaccttgcagcagctaagtgcactgggattcaatgacggcacgtattgcgccgagggaattattggtacttgtgcgctaagcttagcggctatctctggtcaggccgtgaaaacgatggccgatcaacatttcaaacaggtactctggaactgggccttttgtgcaacgccgttgtttgacagcaagggccgattgacgggaacaatagcgctggcgtgtccggttgagcaaactaccgcagctgatttgccgttgacgttggcaatcgcccgcgaggtcggaaatttactgctgacggacagtttgctcgctgaaactaaccgtcatttaaatcaacttaatgccctgttagaaagtatggatgatggcgtgattagctgggacgagcagggtaatttgcaatttattaatgcccaggcggcgcgggtcttgcgccttgacgcgacggcaagtcagggacgggcaatcactgaactcttaacgttacccgccgtattgcaacaagcaataaaacaggcacatccgctcaaacacgtagaagcaacctttgaaagccagcaccagtttattgatgcggtgataacccttaaaccgataatagaaacgcagggaaccagctttattttgttgctccatcctgtggaacagatgcggcagttgatgaccagtcaattaggaaaagtcagccataccttcgctcatatgccacaggacgatccgcaaacccgccgcttgattcattttggtcgccaggcggcgcgcagtagctttcctgtcctgctttgtggagaagagggcgtgggcaaggcactgctaagtcaggcaattcataatgaaagcgagcgtgctgcaggtccttatatcgccgtcaattgtgagttatatggtgatgctgcgctggcggaagaatttattggtggcgatcgcacggacaatgaaaatggccgtctgagtcggctggaactggcacacggcggcacgctgtttcttgaaaagattgaatatctggcggtggagttacagtctgctttgcttcaggttatcaagcagggggttatcacgcgactggatgcgcggcgtttaataccaattgatgtcaaagtgattgcaacaacgaccgcggacctcgcaatgctggtggaacaaaatcgttttagtcgccagctgtattacgcgctgcatgcatttgaaattaccatcccgcctctgcgtatgcggcgtggcagcattccggcgctggtgaataacaaattacgcagtcttgaaaaacgcttctctacgcggctgaaaattgatgacgatgccctcgctcgcctggtttcttgtgcatggccaggcaacgattttgaactttacagcgtcatcgagaatcttgctctgagtagtgataacgggcgcattcgcgtcagtgatttgccggaacatctgtttaccgagcaggcgacagatgatgtcagcgccacccgcctttccaccagtctgagttttgcggaagttgaaaaagaggcaattattaacgcagcccaggtcacaggcggtcgcattcaggaaatgagcgctttacttgggatcggccgcactacgctgtggcggaaaatgaagcaacatggcattgatgcagggcagtttaagcgccgggtatgaaagacagaaacgatttctgatacatcagagtgatctgtatttcattccggcgcacgctaacaattttcagcatcgtttaagggcttgtctatcccgcacttaaaagctgaagcgatatcctccgttgacttgcttctgatcaaagaggttaccctgcgtgtaatccgcttcgagatagaatgtgtgctgtttgttatactgtgcactgactcccacgccgttattccagccattacctttgaaactgtacttctcccgggagttgttcaacagatattcggtatccccactaaactcgcggatagcgccagtcttcacatagacattcagctggctgttgcctgcggtgatgtcataccccagtatcatgctggcacgccccagcaggctttcgtagtgattcagatgtatattgaggccattactcgccttcatagtcatctcattctggtggctgtatgtaagctgggtttgcggctctatatagaacccataaccagtaggggacaggttgaacctctgcccggcttccagggagatgctcattccattcgcagtgccgttggcgttaacgccgttgttctgactgtccagtacgtggaaactatttttctggcggcttgcttttataacgagatcgctgtaaaaaccgttttgtgccatgtaactggcgtacattcccatgtagtcactacgtgcggtaccgtcgcctccgctatagtccgggcttgcatgtgtactgccaatatacagaccgacatacaacggcattacatcagagagacgtttatccccaccaaactggataccgctgtaacccatgtcaaagccgctcagtttgccactggcaaaggagtccaggcttcccccataactgcgcaaccagatattaccgtctttactctgatttcgcaggtcacccatccgttgcatcagcgtacggttttcaacatagttcaataagtaaccgacattgagataattgccgccagcatctgcggtcgtggtgggtttaggcgtgggagcgggttcaggcgtaggatcggggttgactatgggaggctgagcgggagctggtgtgggttcaggattaggagtcggttccggaactgtcccggaagcgtaaagctcccagttagtgccatttttacgcacatcgtacagatatccccccaactcaacctgagaagacgcgctgaagctggccgcgccgtcagtggtttttaccactgtcagaacttcatttcccgttgtggcctcgctgccctggttgcggatagccaatacgtgattaccagcactactcccgctgatattcaataaatcccctttattattaacgccattaccctcgccaacaacatcagcacgcataataaaggtactgttaccgctcaggttctctacgtttaatgtggcaaatgtgccggcagtactcccgtggctggcaaaatcgacagtactatggctcagcgccagcgtgtcgagattagaattacttgttacgttccagacgctgttattcattgcaacgtccagttttccgccattgacattatcgctgagggaggaacctgtccaaacgttcccagggtgcatatccagattgattagcccacctttggaaagaacgctaccgttgataagcatacgaccgctggcgttgatgcggctggcggcataaccatcgtcatgttgcgttgcgatggccatctggtcgggtgtactcatatcaatgaccagatcgctcgtgaggtcgatctggctgttggtcatggcataaattcccctggctcctgccgcgccggtgatagccaaactgtctccggttattctaccgccgctgagagcccacaaacccagcgccagactgccattacgatcaactgtaatatcggtattttgcatgttgacaacagccgttgccgtctgggcgctggcaccataagaaccgccggaaaagatgctgtttcgttgcgctgccgtgccagtaaaattgattatcgcgtcactaccactggtgacgaggccaccgccctgcgcggaagaaatatggctatctgcaccgatagtggttgtaccaccacgaacttcgacgccattggccgcggctccagttacatcaacagtgagtgcattcgcgctaacctggccaaagctccagaggccgtgagcattatcgccattggttttaatggtactgtttgttccgagatcgacaacagagtttttctgtacgtttatccccatggcgctgtagccctgaacatcgattgtcaggtctgtagccgtaaaacgcgcagcaccattggcgttattgccgttgagaccaccgatataaacacctgtacttccatcggtcgtgattttacttccgcttccaagatcgacactggtgccatagtcattgatggttaggcctataccgttgctgttttcaatggtgaattgagtggctgttagtgtactgctatgcccaataatgatgccgtcatcgttactcttaatggtgctgcctgtgcctaagtcagcatgggtatagtcaccaattaagttaatgccgatggcagaggtttgaccaacaacatctactgtgagtcggttagctgtcagggagctgtttttgccctgaataatgattccttttgcatatccagaggcgtcgttgacattgacggtgacatcattacccaggttgatattgccaggcgtgtttcctgctggggtcattacaccatagaggtttccacttggatcggcggtatctcctgtaattctgtcaccatcattaatagtaatattggtgccatattgacttcctgtatcagcagctatcagcaggggggaaaagataattgcattcaaaccaatagcgccaaattttatcagttgaatactggggctacggatttttaattcagcgagacgatctgctttggtattcccattgtgttgtttgatgcccataccactcctatatagtacccagactatgggtctatggattttgtcattttgtttaaatcaatgaataatatcctcttatcatcatgatatttgtatggtgcaatcatgatgagcttctcagagaataattctctattaccgggcaaaatcaggaacacaggaattaatatatatttaacatcccccttacaaaggtgagtttatatcgagttattccctaagttgtcgttacttattccaattcgttactataaatatggcaaaaatattacaacaaacagcggttaaaaaatttggtgaagattttttgtaataatcctaattagttatgggaatttcgcttgatgtatctgcataacaaaaacaatatgcgccatttttgcattactaataagaaaaagcaaaaaacatcgatattcatttttggtcaatgggttttctggcctatcgttgttattgtgctactggttatcattttcatcttgccagcatattggagcgtgatcaattttgatcagctgtgaagggggctgatgtgtagtgatacaaaaacttacgttatatcactgctaatgagatatccggcatctgaacacttatgtctttaattattctcgtggttcactataggcaataagcacaaaagtgtaggatgttacaagaatgattaggactcggtgaaatgaaaaatccacgcaattgcgtggattttatatacttttgcgctcttcatgagatttagcgaaacctcatgagacaataaattaattagacgttgaaaaggaagttcatcacatcgccatctttcacgatgtaatctttaccttctgcacgcattttgcctgcttctttcgcgccttgttcacctttgtaagtgatgaaatcttcaaagctgatggtttgtgcacggataaagcctttttcaaaatcagtatggattttgcccgctgcctgcggcgcggttgctccaaccggaatggtccatgcacgcacttctttcaccccagcggtgaagtaagtttgcaggttcagcagtttataaccggcacggatcacacggttcaggcccggctcttccagcccaagctcctgcataaactcgtcacgttcttcgtcgtccagttcggcaatgtctgcttcaacagcagcacaaaccggaaccacaacagaaccttctttcgccgcgatttcacgcacctggtcaagatatgggttgttttcaaaaccgtcttcgttgacgttggcgatgtacattgttggtttcagcgtcaggaagctcaggtaacgaatagccgctttctcttcagcgcttaaatccagcgcgcgcagcatacctgcattttccaactggggcaggcatttttccaggaccgccagctcagctttcgcgtctttatcgccacctttggctttcttctgtacgcgatgaatcgcacgttcgcaggtgtcgaggtctgccagcgccagttcggtgttgataacttcaatatcgtcagccgggttaactttgccggaaacgtgaatgatgttgtcattttcaaagcagcgaacaacgtgaccgatcgcttcggtttcacggatgttggtcaggaactggttacccagaccttcgcctttgcttgcgccttttaccagaccggcgatatcgacaaattccatggtcgtgggaagcgtacgctgcggttttacgatttcagccagttgatccaggcgaggatcaggcattggtacgacgcctgtgttcggctcaatggtgcagaatggaaagttggccgcttcaataccggctttggtcagcgcgttgaacagggtagatttcccgacgttgggcaaaccgacgataccgcatttgaatcccatgatttaaatcaccttaatatcttaataatcaacctgttattgctaacagattgcagaaatggaaataactttgcctattatacacggcactcggcaaaaatgccgcagacaacgacttattgcgctttaaaggcgtgcaatcggttcgttgctttggtcaagccatctgtaaaccacatttcagtacaacgcgccgcttcgtcaatggcttcatcaattaacttctgttcactaacaggcggtttgcctaacacaaaaccgacaactttatttttatcgcccggatgaccgattccgatgcgtaaacggtgaaagttagggttattacccaatttactgatgatgtctttcagtccattgtgaccaccatggccaccgcccaatttaaatttggcgacgccaggaggcagatccagttcgtcgtgggccaccagaatttcgtccggattaatgcggaaaaaactggccatcgccgcaacggctttgccgctgagattcataaatgtagtcgggactaacaggcggacatcttcgcctccaagagtgactcggctagtataaccaaagaatttagcctcttcgcgcagcggagcgcgcaaacgctctgccagtaagtcaacgaaccaggtaccagcattatgtcgcgttgcggcgtattcagcaccggggttcgccaggccgacaatcaatttaatcgtcacgtttttttgtcctgagtgtgtacataactggcgcgtagtttactggttgcggccccgcttgacaaaaaactgcgtatcaaatgcagataacgtaataattgcctgagtggactattagaaagtcaaggtgttcaggcgtttatttgtaaagttttgttgaaataagggttgtaattgtgatcacgcccgcacataacccactgggtgttgtctatactttacacataaggaagaggggtattccctgttacaacccagaaagttccggaggtgacatatgaaacgcaaaaacgctagcttactcggtaacgtgctcatggggttgggtctggtggtaatggtggtcggcgtggggtatagtatcctcaaccagttaccacagtttaatatgccccagtatttcgcacatggtgcagtgctaagtattttcgtcggtgccattctctggctggcgggtgcccgtgttggcgggcatgaacaggtgtgcgaccgttactggtgggttcgccactatgacaaacgttgccgccgtagcgataatcgccgtcatagctaacaaataatgcagtttgctgaccagtcagtttgcgctgactggtcaatctcgtacttataaatccgccatcgccgcgcgacgattcgggaagaacgccaggcgtcccgggatcggttgaatgccagcgcgagccatagtgcgcagtggctggaattccacgttgcacacgcgcagttcacatccctcgggcagacgcttcacaaaacgctggaacgcatcaagaccaccagcatcaagtaccggaacggcatcccacttcagaatcacaatccgtttgccttcaagacgactctccaggtccgtgaataagccttcagcagcagcaaaaaacagcgggccaataacgcgcagaaccaggacatcgtctggaacatctacgactaccggtgccaggcgagtcatacgtgcgatacgacgcataaacagcaggcttgccagcacgatccccacgctgatggcaataaccatatcaaacaacacggtcaggctcatgcacagcagcatgacgatgatgtcatctttcggcgcatgacgcagcaagtcgaccactttgtgcgcttcactcatgttccacgccaccatcaacagcagggctgccatggcggaaagcggcagccaggagagcagcggtgccagtaccagcagggcaagaataaccagaatagagtggatcaccgcgctgataggggacgttgccccggcacggacgttagcggcagaacgcgcgatggcagctgtagcggtaataccaccaaagaacggagcgataatattccccagtccctgtccaaccagttcgctgttcgccttgtgtttcgtcccggtcataccatccagcaccacggcgcagagcagagattcgattgcgccgagcattgccatactgaatgccgcaggcagcagtgtgcgaatagaatcccaggttagcgtgaattcactattaggcagatcccacggcagcaccagttgcggcagcagttgcggaataccgttaccctgagaaccatcggccaggacgtagtggaattggctaccgatggtagcaacatgtccgccgagcaggttaacaatccccatcaccgcgcaaccagccagcaaggccggaaggtgaccgggtaaacgaatgcccagacgcggccaaaaaacaagaatacctagcgtcacaatgccaatggcagcatcacccacattaatggtcggcagcgccataaataatgcgccgactttttgtagataatgttccgggacatgggccatttgcagaccgagaaaatctttaatctgcatggtaccgatggtgatcccgataccgctggtgaaacctaaggtgacggaaaccggaatatactcaatcaggcgaccaaagcgtgccagacccatcagaatcaaaaagatcccgctcagcaaggtcgcaaccagcagtcctgccagtccaaactgttggctcacgggatagagaattaccacaaatgccgcagtcggaccggaaacgctaaagcgactcccacccgtcagagcaatgacaatccccgcaacagctgcggtatataaaccgtactggggtgccacaccactaccaatagccaacgccatcgccagcgggatagcaataatcccgacggttatcccggcaatcaggtcacgggtaaaccgtgcggcagtatatttttctttccagcaagcgtcgatcagagcgcggaaaggcatcacatgactggaaaatattttgttcacaataatgtttcatccgtgagcgcatcatctgtcaactaaatggcaggtgaaggaggcataggtcatacaaatggatattacagacaaaaaaacccgccgcagcgggtctttgagccgggttcgattagtgttcgaacatggcagagatgctttcttcgttgctgatacgacgaatcgcttcggccagcataccactcagggtcagagtacgcacgttcggcagacttttgatttcatcgctcagcggaatggtatcgcagacaacgacttcatcaattacagagttacgcaggttgttcgccgcgttgccagagaagatcgggtgagtcgcgtacgcaaatacacgtttagcaccacgttctttcagagcttcagcagctttacacagcgtaccgccagtgtcgatcatatcatcgaccagtacgcagtcacgacctgcaacgtcaccgatgatatgcatcacctgactaacgttcgcacgcggacgacgtttgtcgatgattgccatatcggtatcgttcagcagcttagcgatagcgcgggcacgcacaacgccgccgatgtccggagaaaccacaattgggttatccagattcagctgcagcatgtcttccagcaggatcgggctaccaaatacgttatcaaccggaacgtcgaagaaaccctgaatctgttcagcgtgcagatccactgtcagcacacggtcaacaccgacgctggagaggaagtctgcaaccactttcgcagtgattggtacacgagcggaacggacgcgacggtcctggcgcgcatagccaaagtaggggataacagcggtgatacgacctgcggaagcacgacgcagggcatcaaccataacgactaattccatcaggttgtcgttagtaggggcacaagtggactggatgatgaaaatatcaccaccgcgtacattttcattaatttgtacgctgacttcgccatcgctaaagcgacctacagcggcgtcgccgagactagtgtacaggcggttggcaatacgttgtgctagttccggggtggcgttaccagcaaaaagcttcatatcaggcacgagaagaacctcaggcatgcgtccattggtggaaagaatctgccgaaaactgtgcgggccaggcatgatcctttccaggcggtgtattaaagagcgcgatgcaacgtctggaacaaggtgacgttgtcaccgaaactcagcttgcccggcttaaagcatggctctgtgcaatggggaaagattagcgcctttcgccacaaagccattgagccattccggggcttgctctagcacctggcgggcttcagactctgtatcaaattcagcaaagacacaggcccctgtcccagtcaggcggctcggggcgtattctaacagccaggaaagcaccgcatcaacctcgcgaaaacgttttcttgcgataacctcgcaatcattgctgaattcacattttagcaacgtttctatactcctttttggcgtattgcgcgggagttcaggatctttaaaaatcaccggagtcggaatacttacaccagggtgcgccaccagataccacttctctggcggatccaccggcgttagtatttcaccaacgccttcggcaaacgcggcatgcccccgaacaaagacaggaacatctgcgcccagcgtcagccccatttccgccagctcatccatgcttagcccgcattgccagagatgatttaatgccaccaggaccgtcgcggcattggaactaccaccgccgagaccgccgcccatcggcaaacgcttgtcaatgctgatattcgcaccgcttcccgtcggaagacgcccgctgtctgccgcagttttcatcaacaatcgcgctgcgcgaacgatcaggttatcttcatgttccacgccttcaacgggcgttaacagacgaatatccccatcgtcacgaagctcaatgctgatggtgtcgccgtaatcaagaaactgaaacagcgtttgcagcgtgtggtaaccatccgcacgctgaccggtaatgtataaaaacagattaagttttgccggagagggccactgtgtccgcattatttcactatccagttatccatttttaacttgatgcgttgaccaccgtcggtgagttccatattggctggcatcgcaggttgcgttttggtgtcataaccaccataaacaaccttccagtttttgccattctggctgtaggtaatttcgctcaggcggtactggtcgtccagtttgtagtcggttgcatcacccggtaaacctaaaatccactggcgcaagctgttgagcggaattggcattccggtcaatttgccaatcatctcttcggcgtcatcggcggtataacgctgacctttattgtcgactaactgcacgttacccggttgagcattcagctccagttccgtgctgcccaatgggttagtgagcagcagacggtagcgatcctggccggtttgctgccagaaaaagcgggcgtacactttttgttggtcagaaatataagcgaacgcgccgcgagtctgatactgattaagattgcgcacgtcttgctgatgctgacgccattgtgggctatccgggcttttgccaggacctttgggcgtggtaacggaacaggcagtgagcacaagagcagccagcggtagcaggcggataagacgaaaatcgggcaggggcatagtgatgacaagtccttgagatacgttgcagttataacccttaatgctagcgttaccgtccgctatcgtctatgttcaagttgtcttaattgccagaatctaacggctttcggcaattactccaaaagggggcgctctcttttattgatcttacgcatcctgtatgatgcaagcagactaaccctatcaacgttggtattatttcccgcagacatgacccttttagcactcggtatcaaccataaaacggcacctgtaagcctgcgagaacgtgtaagctttagcccggataagctcgatcaggcgcttgacagcctgcttgcgcagccgatggtgcagggcggcgtggtgctgagcacgtgcaaccgcacggaactttatcttagcgttgaagagcaggacaacctgcaagaggcgttaatccgctggctttgcgattatcacaatcttaatgaagaagatctgcgtaaaagcctctactggcatcaggataacgacgcggttagccatttaatgcgtgttgccagcggcctggatagtctggttctgggggagccgcagatcctcggtcaggttaaaaaagcgtttgccgatagccaaaaaggtcatatgaaggccagcgaactggaacgcatgttccagaaatctttctctgtcgcgaaacgcgttcgcactgaaacagatatcggtgccagcgctgtgtctgtcgcttttgcggcttgtacgctggcgcggcagatctttgaaagcctctctacggtcacagtgttgctggtaggcgcgggcgaaactatcgagctggtggcgcgtcatctgcgcgaacacaaagtacagaagatgattatcgccaaccgcactcgcgaacgtgcccaaattctggcagatgaagtcggcgcggaagtgattgccctgagtgatatcgacgaacgtctgcgcgaagccgatatcatcatcagttccaccgccagcccgttaccgattatcgggaaaggcatggtggagcgcgcattaaaaagccgtcgcaaccaaccaatgctgttggtggatattgccgttccgcgcgatgttgagccggaagttggcaaactggcgaatgcttatctttatagcgttgatgatctgcaaagcatcattagccacaacctggcgcagcgtaaagccgcagcggttgaggcggaaactattgtcgctcaggaaaccagcgaatttatggcgtggctgcgagcacaaagcgccagcgaaaccattcgcgagtatcgcagccaggcagagcaagttcgcgatgagttaaccgccaaagcgttagcggcccttgagcagggcggcgacgcgcaagccattatgcaggatctggcatggaaactgactaaccgcttgatccatgcgccaacgaaaagtcttcaacaggccgcccgtgacggggataacgaacgcctgaatattctgcgcgacagcctcgggctggagtaacagtacatcattttctttttttacagggtgcatttacgcctatgaagccttctatcgttgccaaactggaagccctgcatgaacgccatgaagaagttcaggcgttgctgggtgacgcgcaaactatcgccgaccaggaacgttttcgcgcattaagtcgcgaatatgcgcagttaagtgatgttagccgctgttttaccgactggcaacaggttcaggaagatatcgaaaccgcacagatgatgctcgatgatcctgaaatgcgtgagatggcgcaggatgaactgcgcgaagctaaagaaaaaagcgagcaactggaacagcaattacaggttctgttactgccaaaagatcctgatgacgaacgtaacgccttcctcgaagtccgagccggaaccggcggcgacgaagcggcgctgttcgcgggcgatctgttccgtatgtacagccgttatgccgaagcccgccgctggcgggtagaaatcatgagcgccagcgagggtgaacatggtggttataaagagatcatcgccaaaattagcggtgatggtgtgtatggtcgtctgaaatttgaatccggcggtcatcgcgtgcaacgtgttcctgctacggaaagccagggtcgtattcatacttctgcttgtaccgttgcggtaatgccagaactgcctgacgcagaactgccggacatcaacccagcagatttacgcattgatactttccgcagcagtggggcgggtggtcagcacgttaacaccaccgatagcgcaattcgtattactcacttgccgaccgggattgttgttgaatgtcaggacgaacgtagtcaacataaaaacaaagctaaagcactttctgttctcggtgctcgcatccacgctgctgaaatggcaaaacgccaacaggccgaagcgtctacccgtcgtaacctgctggggagtggcgatcgcagcgaccgtaaccgtacttacaacttcccgcaggggcgcgttaccgatcaccgcatcaacctgacgctctaccgcctggatgaagtgatggaaggtaagctggatatgctgattgaaccgattatccaggaacatcaggccgaccaactggcggcgttgtccgagcaggaataatggaatatcaacactggttacgtgaagcaataagccaacttcaggcgagcgaaagcccgcggcgtgatgctgaaatcctgctggagcatgttaccggcagagggcgtacttttattctcgcctttggtgaaacgcagctgactgacgaacaatgtcagcaacttgatgcgctactgacacgtcgtcgcgatggtgaacccattgctcatttaaccggggtgcgagaattctggagcttgccgttatttgttagcccagcgaccttaattccgcgcccggatacggagtgtctggtggagcaggcactggcgcggttgcctgaacaaccttgccgtattctcgatctcgggacgggtaccggggcgattgcgcttgcgctggctagcgagcgcccggactgcgaaattatcgctgtagatcgtatgcctgatgctgtctccctggcacaacgtaatgcccagcatctggcgatcaaaaatatccacattctgcaaagcgactggtttagcgcgctagccgggcagcagtttgcgatgattgtcagcaatccgccgtatattgacgagcaggaccctcatcttcaacaaggcgatgtccgctttgagccgctcactgcgctggttgcggcagacagtggaatggcagacatcgtgcatatcatcgaacagagccgtaacgcgctggtatccggcggctttctgcttctggaacatggctggcagcagggcgaagcggtgcgacaagcatttatcctcgcggggtatcatgacgtcgaaacctgccgtgactatggtgataacgagcgcgtaacgctcggccgctattatcaatgacaagtttttctacactgcttagtgttcatcttattagtatcgcgctttctgttgggctattaaccttacgtttctggctacgttatcagaagcatccacaggcatttgctcgctggacgcgcattgtgccgccggttgtcgatacgctgttactgttaagcggcattgcgttgatggctaaagcgcacatcctgccattttccgggcaggcacagtggctgactgaaaagctgtttggagttatcatttatatcgttttgggttttattgcactcgattatcgtcgtatgcacagtcagcaggcgcgcattattgccttcccgctggcgttggtggtgctgtacatcatcattaaactcgccaccacaaaagtaccgttactggggtaagtcatgagaagcttagctgatttcgaatttaataaagcgccattgtgcgaaggcatgatcctggcttgcgaagcaatccgccgcgattttcccagccaagatgtttacgacgaactggagcgtctcgttagtctggcgaaggaagaaatcagccagcttctgcctttagaagagcagttggaaaaactgatcgcgctgttttacggcgactggggatttaaagccagtcgcggtgtttatcgtctttccgatgcattatggctggaccaggtgttaaagaatcgacagggcagtgcggtaagtttaggtgcggttttattatgggtcgcgaatcgtctcgatttgccgctgctgccggtgattttccctacgcagctgatattgcgcattgaatgtccggatggcgaaatttggctgattaatccttttaacggtgaaagcttaagcgaacatatgctggacgtatggttaaagggaaatatcagcccgagcgcggaactgttttatgaagaccttgatgaagctgataacattgaggtaatccgcaaattgctggatacactcaaagccagcttgatggaagaaaatcagatggagctggcgttacgcaccagcgaagctttattacaattcaaccctgaagatccctatgaaattcgcgatcgcgggttgatttatgcgcaactggattgcgaacacgttgcgttgaacgatttaagttatttcgttgaacagtgtccggaagacccgatcagcgaaatgatccgtgcgcaaataaataacatcgcgcataaacatattgtgctgcattaattaatcgacattttactcaagattaaggcgatcctatgaaacaaaaagtggttagcattggcgacatcaacgtagcaaatgacctgccgttcgtactgtttggcggtatgaacgtgttggaatctcgcgatctggcgatgcgcatttgcgagcactacgtaactgtgacccagaaactgggtatcccttacgtgttcaaagcctcttttgacaaagccaaccgctcctccatccactcttatcgtggaccgggcctggaagaagggatgaaaatcttccaggagttgaagcagacttttggcgtgaaaattatcaccgacgttcacgaaccaagtcaggcacagcccgttgctgatgtcgtggatgtgattcagttgccggcgtttcttgctcgccagactgacctggttgaagccatggcgaaaaccggtgcggtaattaacgtcaagaaaccacagtttgtcagcccgggacagatgggtaatatcgttgataaattcaaagaaggcggcaacgaaaaagtgattctttgcgatcgcggtgctaacttcggctatgacaacctggttgtcgatatgctgggcttcagcattatgaagaaagtgtctggtaacagcccggtgattttcgacgtgacccacgcactgcaatgccgcgatccgtttggcgcagcttccggtggtcgtcgtgctcaggtggctgagctggcacgagccggtatggcggtaggtctggcggggctgtttattgaagcgcatccggatccggaacatgcgaaatgtgatggtccatccgcgctgccgctggctaaactggaaccgttcctcaagcagatgaaagcgattgatgatctggtgaaaggtttcgaagaactggataccagcaagtaatcttttttgcttgaaaaataaagtattagcgttctgcgttaagacttttttcatgggtgccggatacaaaaaaggccgcaggctgttacccctgcggccggtttcgggcgcatattgccatcacggcagcctgacgcccgttttcaccttacttccggttacgccaccagctgacaatcgctgcggtaataattcccgccaggatcggtgctgccaggtcgtgccagaaaatcatggcaaactgcgcgagcgtcatatagccgccttgttgtaatgacaacattttgcggctattcttgaattgttctggttcaagattagcccccgttctgttgtcaggttgtacctctcaacgtgcgggggttttctctttccagcaaccaatgccaccagggataaagcccccgcaacattgcgcctcaccggataacgccggcttggtgtggatactacgactcaattcatcttcacttcatccctgaaatgtttgcaatgaagagtgcattccggtttttcaacagctgttacagtcatttcatgagtgctctggatgaggcttccagctcgggttgccaatatttacttgtggaagtgataaagacaaaaatggccgcaggctgttacccctgcggccggtttcgggcgcatattgccatcacggcagcctgacgcccgttttcaccttacttccggttacgccaccagccgacaatcgctgcggtaataattcccgccaggatcggtgccgccaggtcgtgccagaaagtcatggcaaactgcgcgagcgtcatatagccgccttgttgtaatgacaacattttgcggctattcttgaagtgtctggtttcaagattagcccccgttctgttgtcaggttttacctctcaacgtgcgggggttttctctttccagcaaccaatgccaccagggataaagcccccgcaacattgcgcctcaccggataattccggcttggtgtggatactacgtctcaattcatcttcacttcatccctgaaatgtttgcaataaagagtacattccggcttttcaacagctgttgcagtcgtttcatgagtgctctggatgatgcttccagctcgggttgccaatatttacttgtggaagagataaagacaaaaatggccgcaggctgttacccctgcggccggtttcgggcgcatattgccatcacggcagcctgacgcccgttttcaccttacttccggttacgccaccagctgacaatcgctgcggtaataattcccgccaggatcggtgctgccaggtcgtgccagaaaatcatggcaaactgcgcgagcgtcatatagccgccttgttgtaatgacaacattttgcggctattcttgaagtgtctggtttcaagattagcccccgttttgttgtcaggttttacctctcaacgtgcgggggttttctctttccagcaaccaatgccaccagggataaagccccgcaacattgcgcctcaccggataacgccggcttggtgtggatactacgtcgcaattcatcttcacttcatccctgaaatgtttgcaatgaagagtacattccggcttttcaacagctgttgcagtggtttcgtgcagggtgtggtacaggctcgcaattctgattaacgacctgtccaggtagtatgaagaaatacaataagcaggaatttatattatctcccccgattaccgtcatcggaggagatataactgtcaggcaaatatcgtcatcaaataggcggcaaacagtgccagatgcgctgcgccattgagcatgttagtacgtccggtggagaaggagatatggcacagcactaaagaggccaccatcaccaccatttctggcgcaccaagtgcaaactgcaattcgttacccgtcataaaggcaattagcgtgacgacaggtacggtaaggctaatggttgctaacacactaccaaagaacagattcatcgcgcgctgaacctggttgttcaacactgcttttaatgcacctaaaccttccgggctcagaatcaacagtgccaccaggaagccagtaaaggcgacaggggcattcatgctgtcgagcaatgtctccaggctgctggcgttcattttggtcaccgcaataacggcaatcagatggataatcaaccagatagcatgccacaggctgctatgggcagacggtttaccgtgatgcgggtcgtcatcatcactgtcatcttcgtgctcgtagacaaacaaactttgatgcgttttggtctggatcagcaaaaatacgccatacattgccgcagaaattaatgctaccagtaacgcctgaccggtactaaaattcgccgcaggcagagccattggaaataccagtacgattatcgccagggggaacagcgcaattaaatactgcttgataccaaacagattcatatattgggtggcaaacttacgaccgcccaacaataaactaaagccaaccagcccaccggtaacaatcataatgatactatagagcgtatcacgcattagcgttggcgcggcgtcgccggttgccattaaagcactaatcaaactgacttcaagaataaccacactaaggctaagaataaggctaccgtaaggttctcccaggcgatgggctaatacgtccgcatgacggacaacactaaaggcgctacttaaaataccaataagcgcaagaagattgatggcaatgaccactggtagtgtctggctgcttccccacaggaacagcactaccagcgccagaaccgggaaaataaggctagtctccttgtggcgggtttttaccgcctcttgagcattactcattatggttatccctttgcagatgaatttatcgaaaatgtaaaaaataggtaggaaaaataacagaaagtgtctggatatcggtaacattttacgaatttttaccccgctgtcgattttttactcattggggcataaaaataagtattacgtttagacaatgtttgttttagcgtctcttaagaagagtctgacctgaaaattcttatgttttggcaagagtagatattgttgaccacacttaatgttcaactttgtaaaaggagtcaacgatgccgtataaaacgaaaagcgatctgccggaaagcgtaaagcacgttctaccgtctcatgcccaggatatctataaagaagcgttcaacagcgcatgggatcaatataaagataaagaagatcggcgtgatgacgccagtcgcgaagaaaccgcgcataaagtggcctgggctgctgtgaagcatgaatatgccaaaggggatgatgataaatggcataaaaaaagctaaaaccggtcgcttagttaaagctattcgtgcggtgttgccttgcaagtggtccgtggattgcatattgtcccgttagtggtttcaaaatgagcagtaaaaatgtccggaagacaccaaaaagttgtcgcagggaagtatgcagtggcggaagtgtaaggtgataacgcgtgatttcttgatgaatgccgattgtaaaacggcatttggtgccattgaagaaagtctcttatggagtgcagaacaacgggcggctagcctggcggcgacgctggcttgtcgacctgatgagggaccggtgtggatcttcggctatggaagcttgatgtggaatccggcactggagtttaccgaaagctgcaccggtacactggttggatggcatcgcgcattttgcctgcgcctgaccgccgggcgcgggactgcgcaccagccgggacggatgcttgcactgaaagagggcggacgcaccacaggcgtcgcctatcgactgccagaagagacgctggagcaggaactaaccctgttgtggaagcgagagatgattaccggctgttatctgccaacctggtgtcagcttgatcttgatgatggacgcacagtaaacgccattgtgtttattatggacccgcgacatccagaatatgaatctgatactcgcgctcaggtcatcgcgccgttgattgcggcggcgagcggtccgctgggaaccaacgcacaatacctgtttagtctggaacaggagcttatcaaactgggaatgcaggacgatgggctgaatgatttgctggtaagcgtaaaaaaactgctggcggagaattttccggatggtgtgttacgtccgggattcgcctgagtaaacttcccgcatagtggggcgtcagacgccccctcaaacattaaaatgtgagcactttatcggcactcagcgtccattgcgccagttccacaagagtaccgatttccaccccatcaatcagaggaagtgtactaatcccgcgcccgtcggtacaggttttgcacaatttcaccggtacattctgagcggtaaggatctccagcatttgctgaatgttgtagccttcccctggtttttgcccgcgcaacccggctgtgaccgcatcagacatgaggaacagacgcagatccagattgctctcctgctctcgtaacgcaatggccagccgcaagctgttaaacaaggattcgctcccgtaaggtgcgccattggcaacgatcacgattttttgcattatttactcctgtattcagggaattagacactcatcttctatcttactgcttctgcagcgtctgaccaatcggtcacatttttaaggattttcctgaaagcgcgagaaaatacgacaaaagttgccagtaatcgttattctttaaggctatggtttttcattattaccggaagttaccgacgttttgagccgtttcgttcctcgcattatcccgttttatttactcttgcttgtagcaggcggtacagctaacgcacaatctaccttcgagcaaaaagcggcaaatccctttgataataacaatgatggtctgccggatttaggcatggctcccgaaaatcatgatggggaaaaacactttgctgaaattgtgaaagatttcggcgaaaccagtatgaatgataacgggctggatactggcgagcaggcaaaagctttcgcattgggaaaagtccgcgacgcgcttagtcaacaggttaatcagcacgtagagtcctggctaagtccgtggggaaatgccagtgttgacgtcaaagtggataacgaaggacatttcaccggcagtcgtggaagctggtttgtgccgttacaagataatgatcgttatctcacctggagccagcttggtcttactcagcaggataatgggttggtgagcaatgtgggcgttgggcaacgctgggcgcgcggcaactggctggtgggttataacactttttatgacaacttgctggacgaaaatcttcagcgagcgggctttggtgccgaagcgtggggcgaatatttgcgattaagcacaaacttttatcagccgtttgctgcatggcatgaacagacagccacgcaggaacaacggatggcgcgcgggtacgacctgacagctcggatgcgcatgccgttctatcaacacctcaataccagtgtcagcctagaacagtattttggtgatcgtgttgatttgtttaactctggtacgggttatcacaatcccgtcgcgttgagtctgggattaaattacacccctgtgccattagtcactgtgacggcccagcataaacagggtgaaagtggcgaaaatcaaaataacctcgggctgaatcttaattaccgctttggtgtaccgctcaaaaaacaactttctgcgggcgaggttgccgaaagtcagagcttacgtggtagtcgctatgacaatccgcagcgaaataatctaccgactcttgagtaccgacagcgaaaaacgttaacggtgtttctggcgacaccgccgtgggatctaaaacctggcgaaacagtgccgctgaaattacaaatccgcagtcgttacggtattcggcaactgatttggcagggcgatacgcagatattaagtttgacgccgggcgcacaagccaacagcgcggagggctggacgctgatcatgcctgactggcagaacggggaaggggcaagcaatcactggcgattgtctgtggtggtggaagataaccaggggcagcgtgtctcctccaatgagatcacgctaacgcttgtcgaaccgttcgatgcattgagtaacgacgaactgcgctgggaaccgtaatcagaaaatgcgctcctgatgcacccataccgctgcttccacgcgagacttgagcttcattttcttcagcatgtgcttgacgtgcacttttactgtgctttcggtgatatccaggcggcgggcaatcatcttgttcggcaaaccctgggcaatcagcttgagaatatcgcgctcgcgtggggttaactggttaacatcgcgctcagtagtggcacggttagcgcgcaagctggcggccagaacaggcgttaatgcttcgcttaataccatttcgccagcagctgcctgatgcaatgctttcagcagatcttccggttccatatcttttaacagatagccatccgcgccgcgtttcagtgcggtgaccacatcttcttcatggttagagacgctgaataccacaatgcgcccactgagggacttttcgcgcagtttatccagcgtttccagaccgttcatgccgggcatattgagatctaacaggatcagatcgggatcaagagactccgccagttcaataccctgttcgccattactcgcttcgccaaccacggtgatatctggtgccatactgataagctgttttacgccagttcgcagcatcgggtgatcgtcaatcagcaggatagtagccggttcctgattactcatgggtatctccttggacgtctgtgaaagttttttcgggaataaaggtgaccaccacttcggtgccaccactttcacgacggcggacgcggcaatcgcctcgtaaactttgcgcacgatcgcgcattattatcatgccgtagtgattgctgcggatggcattttcaggcacgccgcagccgttatcctggacggtcagtttgacctgattatcgttttgcgccaccgtcaccacgacttcactcgcttggctatgtttgagggcgttacttaatgcctcacgggcaatttgcaacaagtggattgcctgatggctaggcaccaggcgaggcggcaattgataatccagcttcaccgggaagccaaatttggcgctgtactcttcgcaactcgcctccagcgccggacgtaatccaggctcggtgagctgcaagcggaatgtggtgagcaattcacgcaactgcgcccaggatgcattcagttcgttacggatctgacttaacagttcgcggctgctttctggcagcgcatcgccctgcatctgtaaacaactcacctgcatcttcatgcaagagagagattgggcaatagaatcatgcagttcgcgcgcaatggtggcacgctcttccatcacgatcaactgttgctgacgttcctgatggcgatccagcgccagcgtggcggtgagttgttcaaccagggtatccaccagttgttgttgatcatggctaagatgacgcccctgcggcagggtcgccagcaaaataccgtactgcgtatgagagtcagccagccgccacttcagggtcgtgccgcgatcaccaacgggtaatacgccgcgcgggcagagctggcagcctttatcatcacaagtcatatctggctggcaggtaaactcctgatgattctcttcatcatcagtgtcatacacccgcaattcgatatcacgtagcagggttaaattctgtaagccgttgagtacaggactcaggcgttcacacagcggggcgcgggaatgcaaacggcggttagcctgccataaaaaagagaggatctgatttttatgctccagcccggcggttttctcctgaacccgctgctcaagtacggcataactttcggccagttctgcagacatattgttcaacgcagttccaagcatcgccatttcgttgcgcccgctgatgtttgcgcgttgggtaaaatcgcgatgactgacggcactcgccattgccagcagttgccgccacggttgtagcagtcgcgcccgcaaccagataatagtgaacaccagtaaaagtgccataaataccgccattacccgatggaccagtaccactgtctcgatgcgcatttccgtggtgcggtcaaaaccagataccagttgatcaagcccggcaacaaactggctgacatccgcactcaccgtttctcggttttgtgcacgcatcagcgcagggatcagttcattacgccagtaatcttgtaaaccctgtaattgcgccagttgtccgtctcgttctgctgctcgagtcaactcggcgctaaatgccgtttgttccatctctttaattaagggcttgtctttctcgcttaatggcactgccgccaacagacggtaactttgcatgcgcaggcttcccgctttgttgatcgcatgggcgctgccctgaacgccttgcaccagccagccagaaaccgccatccctgccagtccaatagcagtagaaagcaacacaataagcgcaacctgattaaccagggtgagcggagagagacaacgtttaagcatgtaaacctcttccttcaggctttaaatgagcaataaccttaatgaatgtgacgatacattctggaatggcagtattctcggctattggctgaagtatacccatacccggaaagagttactccttatttgccgtgtggttagtcgctttacatcggtaagggtagggattttacagcaccgtgaaaaatctcataatttttatgaagtcactgtactcactatgggtaatgataaatatcaatgatagataaagttatcttatcgtttgatttacatcaaattgcctttagctacagacactaaggtggcagacatcgaaacgagtatcagaggtgtctatgagtcacagttccgcccccgaaagggctactggagctgtcattacagattggcgaccggaagatcctgcgttctggcaacaacgcggtcaacgtattgccagccgcaacctgtggatttccgttccctgtctgctgctggcgttttgcgtatggatgttgttcagcgctgttgcggtgaacctaccgaaagtcggctttaattttacgaccgatcagctatttatgttgactgcgctgcctagcgtttctggcgcgttattacgtgttccatactcctttatggttcctatcttcggtggtcgtcgctggacggcgttcagcaccggtattctgattattccttgcgtctggctgggttttgccgtgcaggatacctccacgccttatagcgtcttcatcatcatctctctgctatgcggctttgctggcgcgaacttcgcatccagtatggcaaacatcagcttcttctttccgaaacagaagcagggtggcgcgctgggtctgaatggtggtctgggaaacatgggcgtcagcgtcatgcagttggttgctccgctggtggtaagtctgagcattttcgcagtatttggtagccagggcgtcaaacagccggatgggactgagctgtatctggcgaatgcgtcctggatatgggtgccgttccttgccatcttcaccattgcggcgtggtttggcatgaacgatcttgctaccagcaaagcctccatcaaggagcagttgccggtactcaaacggggtcatctgtggattatgagcctgctgtatctggcaaccttcggctccttcatcggcttctccgcgggctttgcaatgctgagtaaaacgcagttcccggatgttcagattctgcaatacgctttcttcgggccgtttattggtgcgctggcgcgttctgcaggtggtgcattatctgaccgtctgggcggaactcgtgtcacgctggtgaactttattctgatggcgattttcagcggcctgctgttcctgaccttaccgactgacgggcagggcggaagcttcatggcgttcttcgcggtcttcctggcgctgttcctgacagctgggctgggtagtggttccactttccagatgattagtgtgatcttccgtaaactgacaatggatcgcgtgaaagcagaagggggttctgacgaacgtgcgatgcgtgaagcggcaaccgacacggcggcggcgctgggtttcatctctgcgattggcgcgattggtggcttctttatcccgaaagcgtttggtagcagcctggcattaacgggtagcccagtcggcgcaatgaaggtatttttgattttctatatcgcctgcgtagtgattacctgggcggtatatggtcggcattctaaaaaataaaccgttactcgtcatacttcgggttacatgtgctgcggctgcgttcattcaccccagtcacttactttagtaagctcctgggattcattcacttgccgccttcctgtaaaccgaattatatagagtaaaatatttgattatcctttgcgcggcatgatgtcgcgctttttttatgcgtcatttagttacaacatactaatgttatatggtttatttcgccggatttcattaagagccattaatatgttacccatggggaatactccttaatacccatctgcataaaaatcttaatagtttaaataactacaggtataaaacgtcttaatttacagtctgttatgtggtggctgttaattatcctaaaggggtatcttaggaatttactttatttttcatccccatcactcttgatcgttatcaattcccacgctgtttcagagcgttaccttgcccttaaacattagcaatgtcgatttatcagagggccgacaggctcccacaggagaaaaccgatgagtaaattcctggaccggtttcgctacttcaaacagaagggtgaaacctttgccgatgggcatggccagcttctcaataccaaccgtgactgggaggatggatatcgccagcgttggcagcatgacaaaatcgtccgctctacccacggggtaaactgcaccggctcctgcagctggaaaatctacgtcaaaaacggtctggtcacctgggaaacccagcagactgactatccgcgtacccgtccggatctgccaaaccatgaacctcgcggctgcccgcgcggtgccagctactcctggtatctttacagtgccaaccgcctgaaatacccgatgatgcgcaaacgcctgatgaaaatgtggcgtgaagcgaaggcgctgcatagcgatccggttgaggcatgggcttctatcattgaagacgccgataaagcgaaaagctttaagcaggcgcgtggacgcggtggatttgttcgttcttcctggcaggaggtgaacgaactgatcgccgcatctaacgtttacaccatcaaaaactacggcccggaccgtgttgctggtttcagcccaattccggcaatgagcatggtttcttacgcaagcggtgcacgctatctcagcctgattggcggtacttgcttaagcttctacgactggtactgcgacttgcctcctgcgtctccgcaaacctggggcgagcaaactgacgtaccggaatctgctgactggtacaactccagctacatcatcgcctgggggagtaacgtgccgcagacgcgtaccccggatgctcacttctttactgaagtgcgttacaaagggaccaaaactgttgccgtcacaccagactacgctgaaatcgccaaactgtgcgatctgtggctggcaccgaaacagggcaccgatgcggcaatggcgctggcgatgggccacgtaatgctgcgtgaattccacctcgacaacccaagccagtatttcaccgactatgtgcgtcgctacaccgacatgccgatgctggtgatgctggaagaacgcgacggttactacgctgcaggtcgtatgctgcgcgctgctgatctggttgatgcgctgggccaggaaaacaatccggaatggaaaactgtcgcctttaataccaatggcgaaatggttgcgccgaacggttctattggcttccgctggggcgagaagggcaaatggaatcttgagcagcgcgacggcaaaactggcgaagaaaccgagctgcaactgagcctgctgggtagccaggatgagatcgctgaggtaggcttcccgtactttggtggcgacggcacggaacacttcaacaaagtggaactggaaaacgtgctgctgcacaaactgccggtgaaacgcctgcaactggctgatggcagcaccgccctggtgaccaccgtttatgatctgacgctggcaaactacggtctggaacgtggcctgaacgacgttaactgtgcaaccagctatgacgatgtgaaagcttataccccggcctgggccgagcagattaccggcgtttctcgcagccagattattcgcatcgcccgtgaatttgccgataacgctgataaaacgcacggtcgtagcatgattatcgtcggtgcggggctgaaccactggtatcacctcgatatgaactatcgtggtctgatcaacatgctgattttctgcggctgtgtcggtcagagcgggggcggctgggcgcactatgtaggtcaggaaaaactgcgtccgcaaaccggctggcagccgctggcgtttgcccttgactggcagcgtccggcgcgtcacatgaacagcacttcttatttctataaccactccagccagtggcgttatgaaaccgtcacggcggaagagttgctgagtccgatggcggacaaatcccgctataccggacacttgatcgactttaacgtccgtgcggaacgcatgggctggctgccgtctgcaccgcagttaggcactaacccgctgactatcgctggcgaagcggaaaaagccgggatgaatccggtggactatacggtgaaatccctgaaagagggttccatccgttttgcggcagaacaaccagaaaacggtaaaaaccacccgcgcaacctgttcatctggcgttctaacctgctcggttcttccggtaaaggtcatgagtttatgctcaagtacctgctggggacggagcacggtatccagggtaaagatctggggcaacagggcggcgtgaagccggaagaagtggactggcaggacaatggtctggaaggcaagctggatctggtggttacgctggacttccgtctgagcagcacctgtctctattccgacatcattttgccgacggcgacctggtacgaaaaagacgacatgaatactagcgatatgcatccgtttattcacccgctgtctgcggcggtcgatccggcctgggaagcgaaaagcgactgggaaatctacaaagccatcgcgaagaaattctccgaagtgtgcgtcggccatctgggtaaagaaaccgacatcgtcacgctgcctatccagcatgactctgccgctgaactggcgcagccgctggatgtgaaagactggaaaaaaggcgagtgcgacctgatcccaggtaaaaccgcgccacacattatggtcgtagagcgcgattatccggcgacttacgaacgctttacctctatcggcccgctgatggagaaaatcggtaatggcggtaaagggattgcctggaacacccagagcgagatggatctgctgcgtaagctcaactacaccaaagcggaaggtccggcgaaaggccagccgatgctgaacaccgcaattgatgcggcagagatgatcctgacactggcaccggaaaccaacggtcaggtagccgtgaaagcctgggctgccctgagcgaatttaccggtcgtgaccatacgcatctggcgctgaataaagaagacgagaagatccgcttccgcgatattcaggcacagccgcgcaaaattatctccagcccgacctggtctggtctggaagatgaacacgtttcttacaacgccggttacaccaacgttcacgagctgatcccatggcgtacgctctctggtcgtcagcaactgtatcaggatcaccagtggatgcgtgatttcggtgaaagcctgctggtttatcgtccgccgatcgacacccgtagcgtgaaagaagtgataggccagaaatccaacggcaaccaggaaaaagcgctcaacttcctgacgccgcaccagaagtggggtatccactccacctacagcgacaacctgctgatgctgactttaggtcgcggtggtccggtggtctggttgagtgaagccgatgccaaagatctgggtatcgccgataacgactggattgaagtcttcaacagcaacggtgctctgactgcccgtgcggttgtcagccagcgtgttccggcagggatgaccatgatgtaccacgcgcaggaacgtatcgttaacctgcctggtagcgaaattacccaacagcgtggtggtatccataacagcgtcacccgtatcacgccgaaaccgacgcatatgatcggcggctatgcccatctggcatacggctttaactactatggcaccgtaggttctaaccgcgatgagtttgttgtagtgcgtaagatgaagaacattgactggttagatggcgaaggcaatgaccaggtacaggagagcgtaaaatgaaaattcgtagtcaagtcggcatggtgctgaatctcgataagtgcatcggctgccacacctgtagtgttacctgtaaaaacgtctggaccagccgtgaaggcgtggaatatgcgtggttcaacaacgtggaaaccaagccgggccagggcttcccgactgactgggaaaaccaggaaaaatacaaaggcggctggatccgtaaaatcaacggcaaactgcagccgcgcatgggtaaccgtgccatgctgctgggtaaaatcttcgctaacccgcatctgccggggatcgacgattattacgagccgttcgattttgactatcagaacctgcataccgcgccggaaggcagcaaaagccagccgattgcccgtccgcgtagcctgattaccggggaacggatggcgaaaatcgaaaaagggccgaactgggaagatgacctgggcggtgagtttgacaaactggcgaaagacaagaacttcgacaacatccagaaggcgatgtatagccagttcgaaaacaccttcatgatgtatttgccgcgcctgtgcgaacactgcctgaacccggcatgtgtggcgacctgcccgagcggtgcgatttacaagcgtgaagaagatggcatcgtcctgatcgaccaggataaatgccgtggctggcgtatgtgcatcactggatgcccgtacaaaaaaatctacttcaactggaagagcggtaagtctgagaagtgcatcttctgctatccgcgtattgaagcgggtcagccgaccgtgtgcagtgaaacctgtgtcggtcgtatccgttatcttggcgtgctgttgtacgatgccgacgctattgaacgtgcagccagcaccgagaacgagaaagatctttaccagcgtcagctggacgtgttcctcgatccgaacgatccgaaagtcatcgagcaggcgattaaagacggtattccgctgagcgttattgaagccgcacagcagagcccggtttataaaatggcaatggaatggaaactggcgctgccgctgcatccggaatatcgcacactgccgatggtctggtacgtgccgcctctgtctccgattcagtctgcagcagacgcgggtgagctgggtagcaacggcattctgccagacgtcgaaagcctgcgtattccggtacagtatctggcgaatctgctgaccgccggtgataccaaaccggtactgcgcgcactgaaacgtatgctggcgatgcgtcattacaaacgtgctgaaaccgttgacggtaaagttgatacccgtgcgctggaagaggtcggtctgaccgaagcccaggcacaggagatgtaccgttatctggcgattgctaactacgaagatcgctttgtggtgccgagtagtcatcgtgaactggcacgggaagccttcccggagaaaaatggctgcggctttacctttggtgatggctgccacggtagtgataccaaattcaatctgttcaacagccgtcgtatcgatgccatcgatgtgaccagcaaaacggagccgcatccatgatcgaactcgtgattgtaagccgtctccttgaatatccggatgctgccttatggcagcatcaacaagagatgtttgaggcgattgccgcgagcaaaaatctgccaaaagaggatgcccatgcgctgggcattttcctgcgcgatttaacgacgatggatccgctcgatgcccaggcgcagtacagcgaactgttcgaccgtggccgcgccacgagtctgttgctgtttgaacatgtgcacggcgaatcccgcgaccgcggccaggcgatggtggacctgctggcgcagtacgagcagcacggcttgcagttaaacagccgcgaattgccggaccatctgccgctgtatctggagtacctggcgcagctgccgcaaagcgaagccgtggaaggtttgaaagatatcgcgccgattctggcattgctgagcgcgcgtctgcaacagcgtgaaagccgttatgccgtgctgtttgatctgctgctgaaactggcgaataccgctatcgacagcgacaaagtggcggaaaaaattgccgacgaagcgcgcgatgatacgccgcaggcgctggatgctgtctgggaagaagagcaggttaaattctttgctgacaaaggctgcggtgatagtgcaatcactgcgcatcagcgtcgctttgccggtgccgtcgcgccgcaatatctgaatatcaccaccggaggacagcactaatgcaattcctgaatatgttcttctttgatatctacccgtacatagccggggcggtcttcctgattggtagctggctgcgttatgactacgggcagtacacctggcgcgcggcgtccagccagatgctggatcgcaaagggatgaacctggcgagcaacctgttccatatcgggattctggggatttttgtcggtcacttcttcggtatgctgacgccgcactggatgtatgaagcctggctgccgattgaagtgaaacagaaaatggcaatgtttgctggtggtgccagcggcgtgctgtgtctgattggcggcgtgctgttgctgaaacgtcgtctgttcagcccacgcgtgcgtgcaaccactaccggagcggatatcctgatcctgagcctgctcgttatccagtgcgcgctgggcctgttgaccattccgttctccgctcagcatatggacggtagcgagatgatgaaactggttggctgggcgcagagcgtggtgaccttccacggtggcgcttctcaacacctcgatggtgtggcgtttatcttccgtctgcacctggtgctggggatgacgttattcctgctgttcccgttcagccgtctgatacacatctggagcgtaccggtggagtatctgacacgtaagtaccagctggtgcgcgctcgtcactaagcgaattttagttcacatagaccctgcttcggcggggtttttttatgggcacggtgcggggtgagttgtcggatgcgcttcgcttatccgacctacaggggaggatattgtaggcccggtaaacgtggtgccatcgggcaaaattagctcggagtaacaggttttgattatttaaggaagcgatggtggtgggggaaggattactcagcgctgcgcgcttcgcccttcgggtcgttgcctgcggcaacgctctcagcctggcgctcaagagcaaccttggtcgaagcttcagttccttccccgcttgggcagaatatttgattgcggatagctttgagaattccggggcttttgaaagtgatggtggtgggggaaggattactcagcgctgcgcgcttcgccctagcggtcgttgcctgcggcaacgctctctcgctgacgctcgagccgaaccttaatcgaagcttctcatccttccccgcatgggcagaatatttgattgcggattcgcttgagagttcagggacttttgaaagtgatggtggtgggggaaggattactcagcgctgcgcgcttcgcccttcgggtcgttgcctgcggcaacgctctctcgctggcgctcgagtgctaccttggtcgaagcttctcatccttccccgcatgggcagaatatttaattgcggattcgttgggaagttcagggacttttgaaagtgatggtggtgggggaaggattcgaaccttcgaagtcgatgacggcagatttacagtctgctccctttggccgctcgggaaccccaccaggggtaattcaaattttgaggtaatgcttgagatggtggtgggggaaggattattcgtcgcttcgctcctcacccttcgggccgttgcctgtggcaacgttctctcgctttcgctcgaatcgaaccttagtcgaaggttctcacccttccccgatgagtgcaaactttcacaatctcaccgaagttaccacatcgctgtggtgaattatggtggtgggggaaggattcgaaccttcgaagtcgatgacggcagatttacagtctgctccctttggccgctcgggaaccccaccacggggtaatgctttttactggcctgctcccttatcgggaagcggggcgcatcatatcaaatgacgcgccgctgtaaagtgttacgttgagaaaaatgaactggttgcgtaattttcatccgtaacggattaaaggtaaccagttatttttgctggcgattaaagaataatcgttcgattaccgtaaacaaagacgcgctgtgccagtactttgtatagtgcacgacttaagacgtttttctcgacgtcacgacctgcgcgcatcatatcttcagctgtgtaggtatgatcgacatgaataacgtcctgcatgatgattgggccttcgtccagattgtcattcacatagtgagcggttgcgccaataatcttcacaccacgttcataggcctggtgataaggacgtgcgccaataaacgctggcaggaaactatggtgaatattgatgatcttattcgggaagcgtgccacaaattccggcgttaatacccgcatatacttcgccagcaccacgtagtcaggttgataagcatcaatggcatccgccatcttttgatcgtgctcgttgcgggttaacccttcatggcttaccagctcaaacggaatatcaaaacgctcaaccagagaacgtaaagtatcgtggttaccaataactgccgcgatttcgacatccaggccgccgtaattggctttcatcaacaaatcgccaaggcaatgcgcttctttagtgaccagaatcactatccggcgacgaccggcaggattcagctcacgcacggagccttctggcaatgcgctatcgagatccgccagcagggtggaatcattaaaaatcccttccagttccgtgcgcataaaaaagcgcccggtacggtgatcaacaaattcattgttctgtacgatatttaactcgtgcttgtagcaaatattggtaatacgtgcgatcagacctttttggtccggacaaatagtacgcagaactttacgttggagactatgcattgctggaaaaaccttgttgagagtgtttgctaaaccgtaccgtcaaccattattggccgcagcactttttaaattttttaccactaccacaagggcagggatcgttgcgaccaaactgcggacgtgtaccgtcaatatagtaccattgaccgttttctttcaaaaatcggctacgttcaattattgcacctgttttaccaccttcggtaaatcgagcaacaaaactgacaaatccgatattgtcggcgtcctgccaacaatgttcaaatacggtcaatcccaaccattcagtatgcgcaaatccggccatcaattcggcacgtaacgccgctgctccacaagagggatgccaggtctttattaaataatctgcgtcttgcatcacaaaagcgcagtaacggctacgcatgagatgttctggatcaggtgcaaccttttcaccagacacataagggtggcaacataggctatactcgacagcactaccacagggacaaagctgagacacaaataatctccctggaaacaataacggcgtattaaccgcctgagtagcactatgttaaccgagcagtagcgatgtggctacgattgcattccaggggaatcttgcgggaataatgagaaagataaaaatagggctggcgctgggatctggcgcggcgagaggttggagccatattggcgttattaatgcgctaaaaaaagtgggtattgaaattgatatcgttgcaggatgtagtattggtagcctggtgggcgctgcctatgcatgcgatcgattatctgcgctggaagattgggtgacctctttcagttattgggatgttttacgcctgatggatctctcctggcagcgcggtgggttactgcgcggcgagcgtgtcttcaatcaataccgcgaaataatgccggaaacagagatcgaaaattgttcccgtcgctttgcggctgttgccaccaatttaagtacgggacgtgaattatggtttactgaaggcgatctccatcttgctattcgcgcaagttgcagtattccaggactcatggcacctgttgcacataacggctactggctggttgatggagcagtcgttaacccaattcctatttccctcacgcgtgcattgggggctgatattgtgatagcggttgacctgcagcacgatgctcatttgatgcaacaagatttgctctcctttaatgtcagtgaagaaaatagcgagaatggtgattctctgccgtggcatgcgcgtctgaaagaaaggttaggcagcataacgacacgtcgggcggtgacagcgccaacggcaacagagattatgaccacttctatccaggtgctggagaaccgccttaaaaggaaccgcatggcaggtgatccgcccgatattctgattcaacctgtttgcccgcaaatatctacgcttgatttccatcgcgcgcacgctgccattgcggccggacagctggcagtggaaaggaaaatggacgaacttttgccgttggtacgcaccaacatttgaccagaatttttatctacacttaagttaattctgacaggcgcaggtggcaatagcatgccactattgagtaaagccagtcaggggagagaacatgacgcagccattggtcggaaaacagattctcattgttgaagatgagcaggtatttcgcagccttctggatagttggttttccagtttgggagcgacaacggtactggcggctgatggggtggatgcccttgagttgctgggaggtttcactccagacctgatgatatgtgatatcgcgatgccacgaatgaacgggcttaaactgctggagcatatacgtaacagaggcgaccagaccccagttctggtgatatctgccactgaaaatatggcagatattgccaaagcgttacgtctgggcgttgaagatgttttgctgaaaccagttaaagatctgaatcgcttgcgcgagatggtttttgcctgtctctatcccagcatgtttaatagccgcgttgaggaagaggaaaggctttttcgcgactgggatgcaatggttgataaccctgccgcagcggcgaaattattacaggaactacaaccgccggttcagcaggtgatttcccattgccgggttaattatcgtcaattggttgccgcggacaaacccggcctggtgcttgatattgccgcacttagcgaaaacgatctggcattttattgccttgatgtcacccgagctggacataatggcgtacttgctgccttgttattacgcgcattgtttaacggattattacaggaacagcttgcacaccaaaatcaacggttgccagagttgggcgcgttattgaagcaggtaaaccatttacttcgtcaggccaatctgccggggcagtttccgctattagttggctattatcatcgcgaactgaaaaatctcattctggtttctgcgggtctgaatgcgacgttaaataccggcgaacaccaggtgcaaatcagtaatggtgttccgttaggcactttaggtaacgcttatttgaatcaattgagccagcgatgcgatgcctggcaatgccaaatatggggaaccggtggtcgactgcgcttgatgttgtctgcagaatgagcaaacgataacgcgggctaaatttgcattacctgctaatgtcggctggtggtactatcgtcgccattcgtataagtaattgtcttaattatgctaactcgcctccttttcagaacttagccccttcggggtgctgatatactgggatgcgatacagaaatatgaacacgttcaaaacacgaacagtccaggagaatttaaatggctgccattaatacgaaagtcaaaaaagccgttatccccgttgcgggattaggaaccaggatgttgccggcgacgaaagccatcccgaaagagatgctgccacttgtcgataagccattaattcaatacgtcgtgaatgaatgtattgcggctggcattactgaaattgtgctggttacacacagttctaaaaactctattgaaaaccactttgataccagttttgaactggaagcaatgctggaaaaacgtgtaaaacgtcaactgcttgatgaagtgcagtctatttgtccaccgcacgtgactattatgcaagttcgtcagggtctggcgaaaggcctgggacacgcggtattgtgtgctcacccggtagtgggtgatgaaccggtagctgttattttgcctgatgttattctggatgaatatgaatccgatttgagtcaggataacctggcagagatgatccgccgctttgatgaaacgggtcatagccagatcatggttgaaccggttgctgatgtgaccgcatatggcgttgtggattgcaaaggcgttgaattagcgccgggtgaaagcgtaccgatggttggtgtggtagaaaaaccgaaagcggatgttgcgccgtctaatctcgctattgtgggtcgttacgtacttagcgcggatatttggccgttgctggcaaaaacccctccgggagctggtgatgaaattcagctcaccgacgcaattgatatgctgatcgaaaaagaaacggtggaagcctatcatatgaaagggaagagccatgactgcggtaataaattaggttacatgcaggccttcgttgaatacggtattcgtcataacacccttggcacggaatttaaagcctggcttgaagaagagatgggcattaagaagtaacatccgtatcggtgttatccacgaaacggcgttgagcaatcgacgccgtttttttatagcttattcttattaaattgtcttaaaccggacaataaaaaatcccgccgctggcgggattttaagcaagtgcaatctacaaaagattattgcttgatcaggaaatcgtcgagggatttaccttgctcatccattgcttttttgattacagctggagtacggccttggccagtccaggttttagtttcgccgttttcgtcaacgtagctatattttgccggacgctgagcacgtttagctttggtgccagatttaacggcagcaaggctattcagcagttcgttcgggtcaataccgtcagcgatcagcatttcgcgatattgctgcagtttacgagtgcgctcttcaacttcagcagcagccgcgctttcttcttcgcgacgttcgttaacaacaacttctaatttttccagcatttcttccagcgtttcaagtgtacattctcttgcctgcgcacgaagagtacggatgttgttcagaattttaagtgcttcgctcattgtagtaatctcaaacttatattggggtggtttgttgaggtaataatagagccttaaattcagttgtgcaatagccaggaatgtaaggaattcaaaattgttctttattttgtgccgccaataaatatcttttcataaaattagccagaaaagacgcggcatatagccctatttacaccgatgatttcgcagcacgtgaggttaaaacttcctgattcatgtcacattttatggggagattatcgtaggctgacgacctttcagtcttctgtattagttgtgtttacgagaattccctattaagcgaatgatgaaaagtagaacagtcgcaataagagcatggacttagtattgcactatctcctggaggtcaacagagggctattacttgcgcaacaggttaaagattgtgaatagttaccagcagtcatttacccgcttataacaagcgaggcagttgtaatgatagctcagaaggattatgcaaggcttcgtaagggagaacgcatatacccacttctgtgcatactgttgagctgaaaaactgacgaattatgataaactccagccaactttatttcatatcattgagggcctgtggctgatggcacagctatatttctactattccgcaatgaatgcgggtaagtctacagcattgttgcaatctagttacaattaccaggaacgcggcatgcgcactgtcgtatatacggcagaaattgatgatcgctttggtgccgggaaagtcagtagccgtataggtttgagtagccctgcaaaattatttaaccaaaatagtagtttatttgatgagattcgtgcggaacatgaacagcaggcaattcattgcgtactggttgatgaatgccagtttttaaccagacaacaagtatatgaattaagcgaggttgtcgatcaactcgatatacccgtactttgttatggtttacgtaccgattttcgaggtgaattatttattggcagccaatacttactggcatggtccgacaaactggttgaattaaaaaccatctgtttttgtggccgtaaagcaagcatggtgctgcgtcttgatcaagcaggcagaccttataacgaaggtgagcaggtggtaattggtggtaatgaacgatacgtttctgtatgccgtaaacactataaagaggcgttacaagtcgacagtttaacggctattcaggaaaggcatcgccacgattaataagaatttctttactgacagggtgagcagggcacttttatcctgtcagttcgttttacgcacttcttccgggctatatacccttctcggcagttttttaacgccgctatacgcctcacagggctcttaagcaccgacgttgacttgtgacctgtaaagtacaatatccctgtgtttaggcgttatacatcgtcgcaaatatgatgaaggctaatgctgtcggtttatggaaaagttgctttgggtaaacaaaaaatacggccccagaagggcaatgccgttcacttaagaggagcggcactatgtttcacaggataacgggtttttgatatcttaaccgacctcggccttgatggtcgggggcgttttgttatgaacaccacttccagagcaccccgaagatgctccagtcgtttcgggatggtccctggtgacgccgtgtttcccagctctatcatttctgatgcgatattcttccacgcaggcagtagccagtggcggttacaacccttctggttcagcgtcagcagcaggtcttcgctgtaaaaaagtttatcaaacaacgtaatagagttatccgggatggtggcgagcatggagtgggccagcacagtttcgctctgccggtaaggtgcggtcacggcattcagcagaatgtgacttcccaggttcattaaggccaccagacgcataaccgggtaggcgttctgccgcttagtggatgtgttggcagacccataatattcacgcagctcgggtttatcaggtgtcctgaactgtgcgccatcaatggcaaaaagttgcaggccgtgccagtcatccttcaggtaacgttccgcgcccctgtctgtgcggtctggcggaagagccattccactggggcggcccccacgcgctgacgcgcctgggtgacagcgctgcgggccagcaggttcatccccgcttcgccatccgcgctcaggttcagacggcgaacaacatcggtaattggctcattgcaccaccatccagataaccatgtcccccggtaaacgacggcggcgaacggtcgcatgagcagaaagcgtcaggcagtgttgtatccactcggtgggaaggtgttctgcaaatagttgtgcagagggcggaggcataagcggatggtcactgaaatcgagcagatcattgagaagtggcataagaaaacggctccctgttgtggaagccgttatagtgcctcagtttaaggatcggtcaactaatccttaactgatcggcattgcccagaaggggccgtttatgttgccagacagcgctactgattaagcggattttttcgcttttttctcagctttagccggagcagcttctttcttcgctgcagtttcaccttctacataatcacgaccgtagtaggtatccagcagaatctgtttcagctcggagatcagcgggtaacgcgggttagcgccggtgcactggtcatcgaatgcatcttcagacagtttatccacgttcgccaggaagtctgcttcctgaacgccagcttcacggatagatttcggaatacccagttcagctttcagcgtttccagccatgccagcagtttctcgatcttagcagcagtacggtcgcccggtgcgctcagacccaagtggtcggcaatttcagcataacgacggcgagcctgcggacggtcatactggctgaatgcagtctgcttggtcgggttgtcgttcgcattgtagcgaataacgttacaaatcagcagggcgtttgccagaccgtgcggaatatggaactgggaacccagtttgtgcgccatactgtgacatacacccaggaaggcgttcgcaaacgcgatacccgcgatagtcgctgcactgtgaacacgttcacgcgctaccggatttttagacccttcgtggtaggacgctggcagatattctttcagcagtttcagtgcctgcagagcctgaccatcagagaactcagatgccagtacagaaacataagcttccatggcgtgagttactgcgtccagaccaccgaaagcacacagggacttcggcatgtccataaccaggttggcgtcgacaatcgccatatccggagtcagcgcatagtctgccagcggatatttctgaccagtagcgtcgtcagttacaaccgcaaacggagtgacttcagaacctgtaccagaagtggtggtgacagcgatcattttcgctttcacgcccattttcgggaacttgtagatacgtttacggatatccataaagcgcagcgccagctcttcgaagtgagtttccggatgttcgtacataacccacatgatcttcgcggcgtccatcggggaaccaccacccagcgcgataatcacgtctggtttgaaggagtttgccagttctgcacctttacgaacgatgctcagggtcgggtccgcttctacttcgaagaagacttcagtttcaacgcctgctgctttcagtacggaagtgatctgatcagcataaccattgttgaacaggaagcggtcagtcacgatgagcgcacgtttgtggccatcagtaatcacttcatccagcgcgattggcagggagccacggcggaagtagatagatttcggaagtttgtgccacaacatgttttcagctcgcttagcaacggttttcttgttgatcaggtgtttcggaccaacgttttcagagatggagttaccaccccaagaaccacaacccagagtcagggaaggtgcgagtttgaagttatacaggtcaccgataccaccctgagacgctggggtgttaatcaggatacgcgccgttttcattttctgaccgaagtaagaaacgcgagccggttggttatcctggtcagtgtacaggcaagaggtatgaccgataccgcccatagcaaccagtttctctgctttttctaccgcgtcttcgaaatctttagcgcggtacattgccagagtcggggacagtttttcatgtgcgaacggttcgctttcatcaacaacggtcacttcaccgatcagaatcttggtgttttctggtacagagaagcctgccagttcagcaattttataggctggctgaccaacgatagccgcgttcagcgcaccgtttttcaggataacatcctgaacagctttcagctctttaccctgcaacagatagccgccgtgggttgcaaaacgttcacgtacagcgtcataaacagagtcaacaacaacaacagactgttcagaagcacagattacgccgttgtcgaaggttttggacatcagtacagatgcaactgcacgtttgatatcagcagtttcatcgataacaactggagtgttgcccgcgcctacaccgatagctggtttaccggagctgtatgcggctttaaccatgcccggaccaccagtcgcgaggatcaggttgatgtctgggtggtgcatcagtgcgttagacagttcaacagaaggttgatcgatccagccgatcagatctttcggagcaccggcagcgatagcagcctgcagaacgatatcagccgctttgttggtggcatcttttgcacgcgggtgcggggagaagataatggcgttacgggtcttcagactgatcaggcttttgaagatagcagtactagtcgggttagtggtcggaacgataccgcaaataataccgattggttcagcgatagtgatggtaccaaaagtgtcgtcttcagacagaacaccacaggttttttcatctttataggcgttgtagatatattcagaagcaaagtggtttttgatcactttatcttcgacgatacccatgccggattcggcaacggccattttcgcgagtgggattcgagcatctgcagcagccagagcggcggcgcggaagattttgtctacttgctcttgagtgaaactggcatattcacgctgggctttttttacacgctctacgagtgcgttaagttcagcgacattagtaacagccataatgctctcctgataatgttaaacttttttagtaaatcatctgctcgaatacgagagtatagtcagtgcggtgatgatttgcttaacctatgaaaatcaaaagcttactcgcgctcacactcactgtgatttactaaaagagtttaaacattagagttattatctctaatgcgtcacttccaggtggcgtaagcaagattactcacttctgggtactgattacgtgatccaaatcaaatttttgcaaagctgacacctttcagcatcgcttttcgccattatagctaacagttaataaattgtagtatgatttggtggctacattagcatgttttgcacaactagataacaataacgaatgatagcaattttaagtagttaggaggtgaaaaatgctgtcaaaaggcgtattgtcagcgcgtcttttcaaccttatttatggctaacattatccggcttttgcttcggagctaaccgtgattcagaccttttttgattttcccgtttacttcaaatttttcatcgggttatttgcgctggtcaacccggtagggattattcccgtctttatcagcatgaccagttatcagacagcggcagcgcgaaacaaaactaaccttacagccaacctgtctgtggccattatcttgtggatcagcctttttctcggcgacacgattctacaactttttggtataagtattgatagcttccgtatcgccgggggtatcctggtggtgacaatagcgatgagcatgatcagcggcaagcttggcgaggataaacagaacaagcaagaaaaaagtgaaaccgcggtacgtgaaagcattggtgtggtgccactggcgttgccgttgatggcggggccaggggcgatcagttctaccatcgtctggggtacgcgttatcacagcattagctatctgtttggtttctttgtggctattgcattgttcgctttatgttgttggggattgttccgcatggcaccgtggctggtacgggttttacgccagaccggcatcaacgtgattacgcgtattatggggctattgctgatggcattggggattgaatttatcgttactggtattaaggggattttccccggcctgcttaattaattcctttcaaatgaaacggagctgccatgctccgtttacttcgtcattatttttactttgttcccgcgcagttatcaaaagcaaaaggaataggtaaaaatattcttctcaaattacagttagttataaggatttccttaactgcttctcctcaccatcatgttattttcgccacatcataatcctgggcttgctgaagaataattgaaatgatattattaattccactgcctttggtagaggaaagtgctaaataataatcaattgttaaattattgtgcatttcactactggaactgtaatcagaaaagatagacatgcttagccaatctctatttgattgaattgaaagatgtttgttaaggcatggatgcaagctatagattctgatacggtcaataaaagagaattgcttaacaattttgcaaaatgtattggcgagtaagaaccgcatttggtactttccgggcaaccgccagacgattctttattggtaatgagaataattaacaattaaagagcgtcgcgaaagaataatgtgtctcgacaggggagacacagtacgaatcgacataaggtgatcgtctgaatcaccagaataaataaagtcggtgatagtaatacgtaacgataaagtaacctgacagcagaaagtctccgagcctgtgcagggtcccaatccgggattacacatgctggttaataccagtaattataatgagggagtccaaaaaacaatgaccaacatcaccaagagaagtttagtagcagctggcgttctggctgcgctaatggcagggaatgtcgcgctggcagctgatgtacccgcaggcgtcacactggcggaaaaacaaacactggtacgtaacaatggtagtgaagttcagagtttagatccgcacaaaattgaaggtgttccggagtctaatatcagccgagacctgtttgaaggcttactggtcagcgatcttgacggtcatccagcacctggcgtcgctgaatcctgggataataaagacgcgaaagtctggaccttccatttgcgtaaagatgcgaaatggtctgatggcacgccagtcacagcacaagactttgtgtatagctggcaacgttctgttgatccgaacactgcttctccgtatgccagttatctgcaatatgggcatatcgccggtattgatgaaattcttgaagggaaaaaaccgattaccgatctcggcgtgaaagctattgatgatcacacattagaagtcaccttaagtgaacccgttccgtacttctataaattacttgttcacccaagtactagtccggtgccaaaagccgctatcgagaaattcggcgaaaaatggacccagcctggtaatatcgtcaccaacggtgcctataccttaaaagattgggtcgtaaacgaacgaatcgttcttgaacgcagcccgacctactggaacaacgcgaaaaccgttattaaccaggtaacctatttgcctattgcttctgaagttaccgatgtcaaccgctaccgtagtggtgaaatcgacatgacgaataacagcatgccgatcgaattgttccagaagctgaaaaaagagatcccggacgaagttcacgttgatccatacctgtgcacttactattacgaaattaacaaccagaaaccgccattcaacgatgtgcgtgtgcgtaccgcactgaaactaggtatggaccgcgatatcattgttaataaagtgaaagcgcagggcaacatgcccgcctatggttacactccaccgtatactgatggcgcaaaattgactcagccagaatggtttggctggagccaggaaaaacgtaacgaagaagcgaaaaaactgctggctgaagcgggttataccgcagacaaaccgttgaccatcaacctgttgtataacacctccgatctgcataaaaagctggcgattgctgcctctagtttgtggaagaaaaacattggtgtaaacgtcaaactggttaaccaggagtggaaaacgttcctcgacacccgtcaccagggtacttttgatgtggcccgtgcaggctggtgtgctgactacaacgaaccaacttccttcctgaacaccatgcttagcaacagcagcatgaataccgcgcattataagagcccggcctttgacagcattatggcggaaacgctgaaagtgactgacgaggcgcagcgcacagctctgtacactaaagcagaacaacagctggataaggatagcgccattgttcctgtttattactacgtgaatgcgcgtctggtgaaaccgtgggttggtggctataccggcaaagatccgctggataatacctatacccggaatatgtacattgtgaagcactaatggcaatacgtggggcaggagtgtcctgctccacggtgtctgatttttatcgcattacagaaggcacaggccagaaggtagggcaatgttaaaatttattctacgtcgctgtctggaagcgattccgacgctatttattcttattactattagcttctttatgatgcgcctcgcgccgggaagcccttttaccggcgaacgtactttaccgccagaagtgatggccaatatcgaagcgaaatatcatcttaatgatccgatcatgacacagtatttcagctacctgaaacaactggcgcacggtgatttcggtccaagctttaaatataaagattatagcgtcaatgacttggttgcatccagttttcccgtttctgccaaactgggagccgcagcatttttccttgcggtaatactgggtgttagtgctggcgttattgccgcattaaaacaaaacaccaaatgggactataccgtgatggggctggcaatgaccggggttgttatccccagttttgtggttgcaccattattagtcatgatatttgcgatcattttgcattggctgccgggcggtggctggaatggtggggcgcttaaattcatgatattgccgatggtggcgttgagtctcgcttatatcgccagtattgcgcgtattacccgtggctctatgattgaagtattacactccaattttattcgtactgcccgggcgaaagggttacctatgcggcggatcattttacgtcacgcattaaaacctgctctgttacccgtgctctcttatatgggccccgcatttgtcggcattattaccggttctatggttatcgaaaccatttatggtttgccggggattggacaactgttcgttaatggcgcattgaaccgtgactattccttagtgttaagcctgaccatcctggttggtgctttaaccattttgtttaatgccattgtcgatgtgctatatgcggttatcgacccgaaaatccgttactgatactggagctcgcgatgatgttaagtaagaaaaacagcgagacgctggaaaatttcagtgaaaagctggaggtcgaagggcgcagcttgtggcaggacgcacgtcgacgttttatgcataaccgtgcggcggttgccagtctgatagtgctggtgctgatcgcgttatttgtaatcctggcaccgatgctttcccagtttgcctatgacgatactgactgggcgatgatgtccagcgccccggatatggagtccggtcactactttggtactgacagttccggtcgcgacctgcttgtgcgcgttgcgattggcgggcgtatcagtctcatggtcggtgttgctgcggcactggtggctgtggtcgtcgggacactttatggtagcctttccggttatctgggcggtaaagtggatagcgtaatgatgcgtctgctggaaatcctcaactccttcccattcatgttcttcgtcattttgctggtgacctttttcggtcaaaacatcctgctgattttcgtggcgataggcatggtttcctggctggatatggctcgtattgtgcgtgggcaaaccctgagtctgaagcgcaaagagtttattgaggcggcacaagttggcggtgtaagcacaagcggcattgttattcgccacattgtgccgaatgtactcggtgtggtggtggtctacgcaagtcttctggtgcccagcatgatcctctttgaatctttccttagcttcctggggttgggtacgcaagagccgttaagcagctggggtgcattgctgagtgatggcgcgaacagcatggaagtctctccatggttattgttgttcccagcgggattcctcgtggtgacgctgttttgtttcaactttatcggcgatggcttgcgtgatgccctcgacccgaaagatcgttaaggagtgcagccatgagcgtaattgaaactgcaactgtgccgctcgcacaacaacaggctgacgcactgctgaacgtgaaagatttgcgtgtcacctttagtaccccggacggcgacgtcacggcggtcaatgatttgaatttttccctacgtgccggagaaacgctgggtattgtaggtgagtctggtagcggtaaaagccaaactgcatttgcgttgatgggcctgttggctgccaacggacgtattggcggaagcgcaaccttcaatgggcgtgaaatcctcaatttgccagagcatgaactcaataaactgcgcgctgaacaaatcagtatgatttttcaggacccaatgactagcttgaatccctatatgcgcgtcggtgagcagttgatggaagtgctgatgctgcataagaacatgagcaaagctgaggcgtttgaagagagcgtgcggatgctcgatgcggtaaaaatgccggaagcgcgtaaacgcatgaaaatgtacccgcacgaattttctggcggcatgcgtcagcgagtcatgattgcgatggccttgttatgtcgacctaagctgctgattgcggatgaaccaacaactgcgctggacgtcaccgtacaggcgcagatcatgacgctattaaatgaactgaagcgggaatttaataccgccatcattatgatcacccacgatcttgtcgtggtggcggggatctgcgacaaagtgctggtaatgtacgccgggcgcacgatggaatatggcaacgcgcgcgatgtcttttatcaacccgttcatccttattctatcggtttgctcaacgcggtgccgcgtctcgatgcggaaggtgaaacaatgttgaccatcccgggtaatccgccaaacctgctgcgattaccgaaaggttgcccgttccagccacgttgtccgcatgcgatggaaatttgtagtagcgcaccgccgctggaagagtttacgcctggccgtctgcgtgcttgctttaaaccggtggaggaactgttatgaatgctgtaactgaaggaagaaaagtcctccttgaaatcgccgatcttaaagtgcactttgaaatcaaagatggcaaacagtggttctggcaaccgccgaaaacgctcaaagccgtcgatggtgtcactcttcgcctgtatgaaggggaaacattaggtgtggtaggggaaagcggatgcggtaagtccacctttgctcgcgccatcatcggtttggtcaaggcgaccgacggtcatgttgcctggttaggtaaagagttgctgggcatgaaacccgatgaatggcgtgccgttcgcagtgatattcagatgattttccaggatccgttggcaagcctaaacccgcgtatgaccatcggcgagatcatcgctgaaccactgcgtacttatcatccgaaaatgagtcgccaggaagttcgcgagcgcgtgaaggcgatgatgctgaaagtcgggttattgcctaacctgattaaccgctatccgcatgagttctctggtgggcagtgccagcgtatcgggattgcgcgtgctcttattcttgaaccgaagctgattatctgtgatgagccggtgagcgcgctggacgtgagtattcaggcacaggtggtcaacctgctccagcaattgcaacgtgagatgggattgagtttaatttttatcgctcatgacctggccgtggtaaaacacatttccgatcgtgtgttggtgatgtatctcggccatgcggtagaactggggacctatgatgaggtctaccacaatccactacatccttacaccagggcattgatgagcgcagtccccatacctgatccggatctggagaagaacaaaaccatccagttactggaaggggaattaccgagcccgatcaacccgccttccggttgtgttttccgtacccgttgcccgattgccggtccagagtgcgccaaaacacgtcctgttctggaggggagtttcagacactccgtttcttgcctgaaagtcgatccgctttaaaaacaataagggctgacagttgtcagccctttttcacgctaaaagcgattatttattcccgccagatgatatggcaaagtttgtgatctttttcgcggcataacagaatgcgggcaaaaacatcgttgatttcaccatcttcactgtccgccagaccaatcaccacttcggcaaaaaagtccgggttcaaatcgaaatcaacatgttcctgccagtcttccgccggatcgaataactccgcgccgccgcgctcttcaaactgaagattgaacagcagaacatcagctggatcgagattgtcggcagccagttcgagaaaaatatcgtaggcctgttcaagcgtttcatcttcagtcaggcgattgtttagatccatatccatagttactacctgtttaacctctgttggcgacgttttacagcaacggactgaagaagtaaaacagtcgctcggcgacacgttgccataatggacgttttagccataaacgggcatcgagcagacgactacggctaatataatcgtcctgaacggcggcgaggtcagcaccaaaacctttatcgtcgattgccagggtaatctcgaaatttagccacagactacgcatatcaaggttaactgtgccaaccagacttagttcgccatcgaccagcacgctcttggtatgcagtaacccgccttcaaactgataaattttaaccccagcagccagcagttccgtaaagaatgcgcgactggcccagccgaccagcatgctgtcattttttcgcggaaggataatactgacatccaccccgcgctgcgccgccgtgcaaatcgcatgaagtaaatcatcgcttggcacaaagtagggcgtggtcatgatcaaatattcacgcgcgctataagccgcagtcaataatgcctggtgaatgagatcttccggaaagccggggccagaagcaattgtgtgaatggtgtgaccgctggcctgttcaaacggcataatattgacatctggtggtggcggcagaatacgttttccggtttcaatctcccagtcgcaggaataaataatccccatcgcggtggcgatagggccttccatacgcgccatcagatcaatccattgccctacgcccgcatcttgtttgaagtagcgaggatcgaccatattcatgctgccggtgtacgcgatgtaattatcgatcatgatcatcttgcgatgttggcgcaggtccatacggcgtaaaaacacacgcatcagattgacctttaaggcttcgaccacttcaataccggcattacgcattagctcgggccacgggctgcggaaaaaagccacactcccggcggagtcgagcatcaatcggcaatgaatgccgcgtcgcgcagccgccattaaactttcagccacctggtccgccatgccgccgggctgccagatataaaacaccatctcaatattatggcgcgcgagctggatgtcgcggattaacgcctgcatcacatcatcactctcggtcatcagttgtagctgattccctttgaccccagcgatcccctgacgacgctcgcaaagcttgaataatggcgcagcgacactgctattttcttcggcgaagatatgcttacaggctttaaggtcgttaagccattttgcggtggaaggccacatcgctctggcgcgctcagcgcggcgtttgcctaaatggagctcgccaacggcaagataggcaataattccgactaacggcagaatgtaaataatcaacagccaggccatcgcggagggaactgcgcgtcgtttcattagaatgcgtaaagttacgcctgcaatgagcaaccagtatcccagaatggccaaccaactcaccaacgtataaacggttgtcatagattagaaatccttttgaaagcgcattgttatgagtttacgcatatggattcatctggcaaataaaaacgcgggaaaagcactggtcagcgtcgggggtgggggtataatgaccattctgttattgcatagagtagttaacatgaagcggagtagaacggaagtggggcgctggcgcatgcagcgtcaggctagccgacgtaaatcgcgttggcttgaggggcaatcgcgccgaaatatgcgtatccacagcatcaggaagtgcattctaaacaaacagcgtaactcgttattgtttgcgatctacaatatctaaatgtactgggcaccattgcggtgcccaataagtttactcttccgtctttaaactttatttttgcgcgctttctttactgtcagctttcgtttctagttcatcgttatcgctgaaaataccatgaccactgttcaacaacatactaacgagcatatcattattaatctcttcaccatttaaaactcgcgccagaatttcgctgccaaacagttgcggactgagaatgatatccggatgtaccatcttaatcttattcaggtttttgctatcactgacggcgagaactgttttgacatcactgctcatatcttttgcgctgagtacaacaaacgcgttatctgcatcgttatcactcagcgccagaatggcccggcaacgatcgattcccgctttctttaatacagaactgtcattactgtcaccggggataacatcagcattatcgcctaagcgttgctcaagttgcttgatatcatcttcaggcaagttgctgataaccgttacgttttgtccgcgttgattcagttgcaggatcgtattgatggcgagaatgctatgtccgcaaacaataaaatgatctttacgatgcattgtatgattgtttccttttacaagtttgttgaatcccccgcggataagcggaccaaaaatactggtcatagatgtggcaaaaacggtaatgccggaaataatgacgctaatagtgaacaatcgtgcactttcagaaacagggacaatatcgccatagccgacggtactcatggtttctatgctaaaatagaacgcggtcatcaaactttctattcgcggattaaaaccttcgcttaaataaagcgcaccgtaggtactgtaaaacagtaatgtcgtgaaactaataaatgcaaaaattgtcccggctgcggcgctactgtgggagaagtctttgcgcagtatcagcaaaaacaccagcgtaaaaatgcaaaatccaatactaaatttcagccagggataaaaatgcagggtgtaaattagcgctatcaacaacaaaatgatactgattgcccatgcgagctttgcccggaacagtaagccaatggagttcaggacaagaaagacgccgagcataaagagtggggcgtttgccagcaaggagagatccaactcactaaatgctttgatatggaaaatatcaagcaaattgacgctcataccatagattgttttaaaaataagcaatccatttaaaaagacggccagcgcgagaatgtcgtgccgaagggtcacccataaatttgttgctgtttgtttgaatgtagcccagtgactcactgatacctctgtaaccacaattttgtttaattatcttagcgtgcacattttctgaacatacatgcagcgcgtgaatgtgttaaacaatagtagatgactttatccgcagtaatcaaaggatttgagcgagcaactgtacctcaggaaaggtcatttttcctgaatatgctcacatcatataaagaaatacagataaagttattatctgcttgtggtggtgaatgcactgaccggctataaggaaaggccaaacaagaacacggttgcaaaaaccgtgcccttaaatattgaatctctattcagaacactttcttaaatggtttcacactaacgtgttcatagactcctgccgctacgtacgggtcagcatcggcccaggcctgagctgcttccaggctttcaaattcagcaataacggtactgccagtaaatcccgcagcccctggatcgttactgtctaccgctggcattggaccagctgtcaacaaacgaccttcatcatgcagtaactgtaaacgtgctaaatgtgccggacgaacggaaaggcgtttttcgaggctatcagctttgtcttgagcgtaaataacatacaacacgggcacaactccttgttcgggaaagttgtaaagtacgttatttgaaagggcgaagatctgcaacggaaagatgatgtctttgttaaggccatgcataaagtaagggtaattacgccaaaaatgacattttcactgatcctgatcgtcttgccttattgaatatgattgctatttgcatttaaaatcgagacctggtttttctactgaaatgattatgacttcaatgacccttgatttacctcgccgcttcccctggccgacgttacttagcgtctgcattcatggtgctgttgtggcgggtctgctctataccagcgtacatcaggttattgaactacctgcgcctgcgcagccgatttctgtcacgatggttacgcctgctgatctcgaaccgccacaagccgttcagccgccaccggagccggtggtagagccagaaccggaacctgagccgatccccgaaccgccaaaagaagcaccggtggtcattgaaaagccgaagccgaaacctaagccaaaaccgaagccggtgaaaaaggtacaggagcagccaaaacgcgatgtcaaacccgtagagagccgtccggcaagtccgtttgaaaatacggcaccggcacgcctgacaagtagtacagcaacggctgcaaccagcaagccggttaccagtgtggctagtggaccacgcgcattaagccgtaatcagccgcagtatccggcacgagcacaggcattgcgcattgaagggcaggttaaagttaaatttgacgttacgccggatggtcgcgtggataacgtacaaatcctcagtgccaagcctgcgaacatgtttgagcgtgaggtgaaaaatgcgatgcgcagatggcgttatgagccgggtaagccaggcagtgggattgtggtgaatatcctgtttaaaattaacggcaccaccgaaattcagtaagcagaaagtcaaaagcctccgaccggaggcttttgactattactcaacaggtaaggcgcgaggttttccttcaggatcaaccgcgacatacttaaataatgcttctgtcgctttatagcgttgcccaattggttcagacgctacttttttcacccacacttcaatattaatgctgacgcttgtcgtccctttctggacacagcgtgcatagcagcacaccacatcgccgaccgcaaccggccgtaagaaagtcattccttcaacccgcacagtcactacgcgaccgtgggcaatttcttttgccagaatagcgccgccaatatccatttgactcattaaccaaccaccaaagatgtcaccattggcattggtatcggcgggcatggctaaagtacgtaaaacaagatcgccctgagggacgttatgtgttgtagacatggtaaaaccgacttaaaaggaaaatcacaggcgcgatgctactatgattttcctgaggagaacagaggagatacagcgccagccccgaaggactggcagtctggttaggatttatcttcctgcggcatgtggcggtagatatagataccgcttaacaatgtgaagattaaggtaagggcggtcaggccaaagactttaaagttgacccaaatattttgcggcagccagaatgcgatgtagatgtttgccagaccgcaaaggataaagaaaacagcccaggccagattcagcttgctccataccggttgcggcagcgtgagttctttacccagcatccgctgaattagcggctttttcatcacccattggctgactaacagggctcccgcaaatagagcataaatgacagtaaccttccatttaataaactcatcattgtggaagaacagcgtcaagccaccgaagacgaccaccagaacaaaagtgatcagggccatcttctcaaccttacgaaagcgaacccagctatagataagcacaatcgccgtggcgacgatcagcgccgcagtagccgcatagatgtcataaatcttgtaaaacgcgaaaaagacaaccagcggtaaaaaatcaagaaactgcttcattttacgattccgtaatcaaatgcttaaggttattggcgaatcaacatatacaggcggaacagatagatgagcaatatggcactaatcaggttgctcaaggtgttcgccagtacggcaccaatttccggggttaatgcggcaaaagaagaggcaaaaagcagcaacagtgtttttgccagcaaccagctcagtactgcgggtgccaccagacgcatattcgcccaagtcagccgcatactgctacgcatgctggcaaaaacgcccattttgtcctgtaccaacatcaccggtgccagggccagtaaaatggccatgataattcccggaacgaccaccagcatgatgccaatctgtactaaaagggtagtcagaaaaatcagaataaataactttggcaatatcggcgcactggcaccaatagctcgcagcgcactgactctctgacccgcagacaccagctggataattaatattacgcctccggcgagaatggcgttaccgattaatccactaaaagtggacgccgcactagcctgcagcaaaatttgttgctgttccggactcatattctgaaccaggtcgaacaacccactactgccgctaacgggcacgccgtcattgagctgcgcaagctgtgcatcactgggactgaaaacatgccctaacaccactgtgataaacgcacatagcaagcttaccaacagaatggtcataaattgattacggaagaaatttccggtgtcacggtatacggactgcgccgtgatagacatgcactctccttgagttttatgcaggtgttaattagcgggcaattgtaccctggttaagcctcgggtggcagcatcaggtcttgtatggaaaagcatatctttgtaaagcggaggtaattgctggccttcaggcatgggcaaatcgcggcaagtggcgaccgagttaatatttgcgtagcgaaaatatttaaaaattgatttaaatcacattaaccaggattctcaatgcaacttctaaattaatccagatcaataaagggtgaattatcatatgtaatgtgatctatgtaggatcatttgttactccaatgtaggtatattcgtcacgtttttataaccataacgacggagcggatatgaaaaagttaacagtggcggctttggcagtaacaactcttctctctggcagtgcctttgcgcatgaagcaggcgaattttttatgcgtgcaggttctgcaaccgtacgtccaacagaaggtgctggtggtacgttaggaagtctgggtggattcagcgtgaccaataacacgcaactgggccttacgtttacttatatggcgaccgacaacattggtgtggaattactggcagcgacgccgttccgccataaaatcggcacccgggcgaccggcgatattgcaaccgttcatcatctgccaccaacactgatggcgcagtggtattttggtgatgccagcagcaaattccgtccttacgttggggcaggtattaactacaccaccttctttgataatggatttaacgatcatggcaaagaggcagggctttccgatctcagtctgaaagattcctggggagctgccgggcaggtgggggttgattatctgattaaccgtgactggttggttaacatgagtgtgtggtacatggatatcgataccaccgccaattataagctgggcggtgcacagcaacacgatagcgtacgcctcgatccgtgggtgtttatgttcagtgcaggatatcgtttttaattccgcacaaaaacgaccccgtaatatacggggtcaataaggacatggtataaagggtattatttcttcgcttctacgccatcagtttcagagcgaattaaaaatttctcagttgtttgcggaatattctgaatcagccagtcggccatttgcttttcctcatttaaaatcgcttcgatggttggaatactagctgtatcaccggcattttttgctgctgctaatagactggtgtaacaggcgatttcaaattgctcgaagacatatccgctaatagagcctttgactatttcatcagaagggaatataccaccgatactctgcccaagcgcagccattttactcatggaatctttaatgacactacgactaatgtcattacgatcaagaatagtttccagttgaacaatctggtttttggtttcactaagatgttgttcaatacgagcgcgtagttcaggataattatctatacggctggccatggattcaagcatagattcggcttgcttttccattgcgtgggcgtcacgtaaccagtcatgataatgttcaatacgattcatgaaaatgtcctctttataaaatgactaaaagttaaaattcatatttcaggctttattttcggctttcttatttacgttattaatggccagatcagtcagtttgatgtcggtggccttttcttcttccagggtttctttcagaagcttcgctgctttacggtaacctaattgttcagccagcgtcgctaatgtcccgtaactggcaatctcataatgctcgactttctgtgctgcggcaatcagtgcggcatcacgcacttcgtttttctcggtactttcgatgacctcattagcttcttcaataagaccttccattgccacacatttcatgcgcttaattttcaggttgctttcggactccacaacttgatcaatacgttcaatctgtccatgagtttcctcgaggtgcgcatgaaaagcctgacttaatttttcattacttgttgctcttgcgagttttgccagtgcccgggttaattgtttttctgcgctgtaggtatcactaagcaggtgaataaatacatcttcaatggtcttcatattcatatttttctccagtgaaatcactgcgagccatacggcccgcagatgcaattatctttatcagctgatattaataattaacggtgaatcaggatttgccacttttattaccaccgctttgttgaccgccttttttacccgcttcagatgcgcgttgcggatcatttttaaaattaccgccgctatgctgaccgcctttacggcctgcgtcggatgccttctcacggtcttcggcgaaatttccactaccaccacgatgttcggccatgttatttctcccgttgcgttgcattgtttcattaatatgagtgttgtgtgtcgacactcattaaaattagtcgctaatgagaattagtcaaattaagcgcaacgagaagatagagggaaaatatattttgaggaacattctggatatattaacaattacctgaggaataagtgacttagagaaaattattgattttactggtgttatgttgcgggattaatttgtttgattatattactgttgggcggaaaaatgacgtaagttgacgttcgaccggggtaagcgaaacggtaaaaagataaatattaaatgaatttaggatttttccggcttcattaaagaaagttaaaatgccgccagcggaactggcggctgtgggattaactgcgcgtcgccgctttcatcggttgtacaaaaactttcagtgccgccagcattttctctggctcattaatatgttgctcgatgattttaacaatggcgctaccagaaatcgcgcccgcagctcctgcatcaatcgctgcttttacctgatccggggcggaaataccaaatccctgcaatggaggtgcagcgttgtactctttcagcttcgcaaccagatgattgaggggtaacgcggcgcggttttctgcgccggtcacgcctgctcgactcagcaaataggtgtaaccacgaccgtaagaggctatctggcgcagcaggtcgtcatcggcatttggcgggcagatgaagataggtgcgacattatgacgcaacgcggcctggcggaagggcgcggactcttcaactggcacatcggcaaccagcacgctatcgacgccgactttttcgcactgggcataaaactcatcaatgcctttgttaaacaccagattggcatacatcaacaggccaatgggaatggtcgggtgtttctggcgaatcagtgccagcatttcaaaacattgtgccggagtcacacctgccgcaaaggcgcgcagagtggcgttttgaatcgtcgggccatccgccagtgggtcggagaaggggatacctaactccagcgcgtcagcaccggcttcaattagcgtatcgataattttcaaactctgctcaatgcccggatcaccgagcgtgacgaaaggaacgaatgcgccttctttgcgctccttcaactgggcaaacagagattcgtagcgttccatcagatttcccctcgtgctttcaaaatatcgtgaacggtgaagatgtctttatcgccgcgaccggaaaggttaaccaccagtagctgctctttatccgggttttcgcgcatcattttcaacgcatgggccagggcgtgggaggattccagcgccgggatgatcccttcgtgcaggcacagcgttttgaaggcttcaagggcttcatcatcggtaatagacacgtaatcagcgcgtccagtgctgttaagatacgcgtgttgtgggccgacagacgggaaatccagtccggcggagatggagtaagattcttcaatctgcccgtcttcggtttgcatcatcggcgctttcataccgaaatagatacccacgcgaccatgttttagcggtgcgccgtgctcgccagtttcgataccgtgaccacctggctccacaccaatcaggccgacgttggtttcattgatgaaatcagcaaacatgccgatggcattgctaccgccgccaacacaggcgataacggcatccggcaggcgaccttctctttccagaatctgcgctttggtttcttcgccaatcatccgctgaaactcacgcacaatggtcggataaggatgcgggccagctgcggtgcccagcatatagtgcgcggtttcgtaactaccggaccagtcgcgcagcgcctcgttacaggcatctttcagcgtcgcggaaccgctatgcaccgggatcacttccgcacccattaagcgcatacgaaaaacgttagggctctggcgttcaacgtctttggcacccatataaatacggcatttcaggccgagcagggcgctggcaagggcgctcgccacgccatgctgaccggcaccggtttcggcgatgatttcggttttacccatccgcttcgccagcaacgcctgccccagcacctggttagttttatgcgcgccgccgtgcagcaaatcttcacgcttgagatacagcgtggtgttcgtcccggctgtaatgttctggcatttggtcagcgcggttggacgcccggcatagtttttcagcaggtcgttgaactgagcctgaaattcaggatctttttgcgcactgacaaaagcttcttccagctggcgcagagcaggcatcaggatttgtggcacgtacatgccgccaaactcaccaaaataggggttaagtaatgttgtcattgttcctttccttaatatgcgcgcagcgtctggaaaacgctggccaaaagacgtgcgtctttgatgcccggttggctctctacagcagaattaaaatcaagtccggcgcagccggtttgtgccgcttccacgcagttatctgcgcctaagccccccgccagcagaacgttgccaaggctttgaccatttaatagactccagtcaaaacgttgcccgcttccaccctggccgttgtctaaaacatatttatcaacgtgctgaaactcgcgggcgggcagggtttcaccgacgcttaatgctttccagatggcaacatgtgctggcagagcttcacgcagcgtatcgatatacagctgttcttcattaccatgcagttgcactgccgccaggcttaacaccttagctttgtccaccacatcggcaatatcgtgattgcggaacacgccaacatactgcaacggtgccgcagccatcacttcctgcgcctgttcaacgttgacgcaacgcggacttgtcgcaacaaaaatcaacccaccgtaaatcgcgcccgcgtcataagctgctttagcatcttgcccacgcgtcaggccacatactttattctcacccagcaacacccggcgcacggcggcgtgcaaatcgtcatgggccatcaacgcgctaccaatcagaaaaccgttagcgaagtggcttaactcgcgcacctgagcgtaagtattgatgccggattcgctgattaccgtcacgttgtgccccagtttcggcgcaagctcgcgggtacggttgagatcaatgctcaaatcacgcagatcgcggttgttgatgccaacgacctttgctcccaatgcaatggcgcgctcctgttcctcttcattactgacttcggtcagcacccccatctccagactgtgagcgacggcggcaagctggcgatattggtcgtcatccagtacactaagcattaataagcaggcatcggcctggtaatagcgcgccagatagatctggtaagggtcgataatgaagtctttacataaaatcggctgcggggcgatttggctgacgatggggaggaaattaaagctcccctgaaaatatttctcatcagtcagcacgctaattgcgctagcgtaatgtttataaatggcggcaatgcgtgctggatcgaaatcatcacggatcacgcctttactcgggctcgctttcttgcactccagaataaacgccgtgcgcgcaccctgtagcgcatcataaaaatgtcgcgtgctcggctgaacctcattctgaaaactggccagcggttgctgctgtttgcgggcttctacccaaatcgccttgtctgcgacgattttcgctaaaacggtttgcatcatttaccctcgtgccgccagtgcggtgactctgtcgtaagcggaaccactgcgcagtacctcaagaacggtttgcgcattggcttgcagatcttcatggccatgcaggcgcattaacatggcgacgttcgcagcgacggctgcttcatgggcggcgtcgcctttaccttgtaacaaacgtgttaaaatgtcacggttttcttccggtgttccgcctgccagttgctcctggtggtagggtgtcaggccaaagtcttctgcggtgagctgatagcttttaatttcgccgtcatgcagttcggcaacgattgtcggcgcgtgtaaactaacttcatccatcccgccgctgtgcaccaccgccgcgcgttgataccccagcacgcgcaaggtttcggcaatcggcagcaccagttccggactataaacaccaattaacgccagcggcggatgcgccgggttaatcaatggccccagcacattgaacagggtgcgggttttcagttgctggcgaaccggcatcgcgtggcggaatccggtgtgatacttcggcgcaaagaggaaacatacacctaactcatccagcgcctggcggcttttatcggcgttcatatcaagattaataccgaacgccgccagcagatcggagctaccagatttactggagacgctacggttgccgtgtttcgccactttcagcccacaggccgcggcgacaaacgcactggcggtagaaatattgatactgttgctgccgtcaccgccagtaccgacgatatcagcaaacagataatccgggcgcgggaacggcgctgcgttttccagtagcgcggttgctgccccggcgatctcgttcgggtgctcaccgcgaattttcatgctcaccagcgccgccgccagttgttccggcttcagctcgccacgcaccaccgcactaaacagctggtggctttcttgttggctaagcgtctgcgcctgatacagtttttccagaatcggttgcagcgtgttggctggctctagtttctgctgcgcccaggccagcgtttgttccagcaggcgagcgccctgggtggtgagaatggattccggatggaactggaatccacaaacgcgatccgcatcgtgacgtactgccatcaccatgccattaaaatgggcgttgatggttaaaccggccggaatgttactgccaaccaggctgtgataacgcgccaccggcagcgggtttgttaatccggcaaacatcgcctgaccgtcatgttcaatgctggaggctttaccgtggagaatttcgcccgcctgaccgacatagcccccgtaagcttcgacaatcgcctgatgtccgaggcaaatgccaataatgggcagcttgccacgcaagcgggtgaggagttccggcatacaaccggcttcgctcggcacaccggggccaggagaaagcatcagcaccggattgctcatggtcgccaggcgttcaattaaggtttgcgccggaatatggttgcggtaaatcaccacgttatgcccattgctgcgcaactgatctgccaggttgtacgtaaaagagtcgatattatcgagcagcagaatgtcagccatcagaaagtctcctgtgcatgatgcgcggtggcaatagcgcgcagtacagcgcgggctttgttacgggtttcgtcggcttcgctctgcggaacagaatcaaggactacaccagcacccgcttgcacggtggcgataccgttttccaccagcgcgctgcggatcacaatgcaggtgtcgagatcgccatgcgcggtgaaataacctaccgcgccgccgtagctgccgcggcgacgaccttccgcctcggcaattaactgcatagcgcgtactttcggcgcaccgcttaacgtccccatattcatacaggcgcgataagcgtgcagggcgtcaagatcgtgacgcagttcgccgactacgcgagagacgaggtgcatcacataggaataacggtcaactttggtgagatcggcgacgtagcggctgccgggggtgcaaatgcgtgccagatcattacgggcgagatcaaccagcatcagatgttcagacagctctttatgatcggtacgcatttccagttcaatacggctgtcgagatctctgtccagactaccatcggcgcgacgaccgcgtgggcgtgttccggcaatcgggtagatctcaatctggcggctggtggcatcatacttgaggctgctttccgggctcgcgccaaatagggtgaaatcattatcctgcataaaaaacatgtacgggctgggattactctttttcagcacgtaataggccgccagcggactcgggcagggcagagagaaacggcgagatggcaccacctggaaaatttctccagcgcgaatcgctttttgcaacaaacgcactacgccaccgaactcttcatcgctctgattacattcacaacgcatatgcggcacggaaaccactggcagcggcggcgcggcttcggtcagttgctgacgtagttcgttcaggcgagcagtgagacgttgtttttcttcttcattcggagcaaacaggctggcctgaatacgggtgctttttttctgatggtcaatcaccatcagcgtttcagcgagataaaaacagaaatcagggcagttattttccgcactcagttgcggtaaatcttcaaatcccgccacaaggtcataagagaacaggccgccgaagaacatggcttctcgttcttccttcggtacattcaacagattctgcaataaacggaaagcgtcaaaaacgctaagggagcataagcgggcgtcttcatccagcagtggactgacaggggggaagcgcagcacacggcagtttggactttgttcactttccacacccgcaggcagggcgttatccagtagtgccaggagggcttcgccgttgccggaaagtgcctggattgtgacagtgtcacctaaagctgtaatgcgcagcgcactgtctaccagcagcaggctttttaaatcatctttgctgtcgatatctgcggattccagcagcagcgttgccggacgatccccacacaactggtgaaaaagcgcggtgggattgtcgcgataagcgccttcgcaggttagcagttcgagagtcggtttttgtgtttgcattgttattctctaattttgttcaaaaaaaagcccgctcattaggcgggctgggtatctgattgctttacgcatggtgaatacactgcccgtttcaggaagtgcgccaccaacctttcagtacgaaaattgctttcattgtcgataccctttttacgtgaacttgcgtactagttaactagttcgatgattaattgtcaacagctcatttcagaatatttgccagaaccgttatgatgtcggcgcaaaaaacattatccagaacgggagtgcgccttgagcgacacgaattatgcagtgatttacgacctgcacagccataccacagcttccgatggctgcctgacgccagaagcattggtgcaccgtgcagtcgagatgcgcgtcggcaccctggcgatcaccgaccatgacaccacagctgcaatcgcgccagcaagagaggaaattagtcgtagcggactggcgttgaatcttattcccggcgtggaaatttccacggtctgggaaaatcatgaaattcatattgtcgggctgaatattgatattactcatccgctaatgtgtgagttcctcgcgcagcagacagaacggcgcaatcagcgggcgcagctgattgccgaaagacttgaaaaagcgcaaatacctggggcgctggaaggcgcacaacgactggcgcagggcggcgcagtgacgcgcggtcattttgcgcgtttccttgttgagtgcggcaaagccagtagtatggcggatgtctttaaaaagtatctggcgcgcgggaaaaccggatacgttccgccacagtggtgtacaatagaacaagctattgatgtcattcatcattctggcggtaaggcggtgctagctcatcctgggcggtacaatcttagtgctaaatggctgaaaagattggttgcgcattttgccgaacaccacggtgacgcgatggaagtcgcgcagtgccagcaaagccccaatgaacgtacccagctggcggcccttgcgcgtcagcatcatttatgggcaagtcaaggatctgattttcatcagccatgcccgtggatcgaactgggtcgtaaactctggctgcccgcaggcgttgaaggcgtctggcagctatgggaacagccgcagaacaccacagagagggaattatgagccagtttttttatattcatcctgataacccacagcaacgtctgatcaaccaggcggtggagatcgtgcgtaaaggcggggtgattgtttatccaactgattccggctatgcgctcggctgtaaaattgaagataaaaacgcgatggagcgtatttgtcgtattcgccagctgccggacggtcacaactttaccctgatgtgtcgcgatctttctgaactcagcacctatagttttgttgataacgttgcgtttcgtttaatgaaaaacaacacgccgggcaactataccttcatcctgaaggggacgaaggaagtgccacgccgtctgttgcaggaaaaacgcaaaaccatcggtatgcgtgtgccttctaaccctatcgctcaggcgttacttgaagcattgggcgaaccgatgctttccactagcctaatgctgccaggcagcgaatttaccgaaagcgacccggaagaaattaaagatcgtctggaaaaacaggtagatttgattattcacggcggctatctcgggcagaaaccgacaacggttattgatcttaccgatgatacgccggtcgtggtgcgtgaaggcgtaggtgatgtgaagcctttcttataacaaattgcgttccacggatggaagactatggcagggaagtttcgctgcattttgctgttgatagcagggctgtttgtaagttctctaagttatgcagaaaacacggagatcccttcttatgaagaagggatcagcctctttgatgttgaagccactctgcaaccagatggggtgctcgacatcaaagaaaatattcattttcaggcgcgaaatcagcagattaagcacggcttttatcgtgatttaccacgactatggatgcagcctgatggggacgctgcactgctgaactatcatattgttggcgtcacccgtgatggtattcctgaaccctggcatcttgactggcatatcgggttaatgagtattgtcgtgggcgataaacaacgtttcttgcctcaaggcgactatcattatcaaattcattatcaggttaaaaatgctttcctgcgtgagggggattctgatctgctaatctggaacgtgaccggtaaccactggccgtttgaaatttataagacccgtttttctctccagttctctaatattgcgggtaatccatttagcgaaatcgatctttttaccggagaagagggcgacacatatcgtaatggccgcatccttgaggacggaagaattgaatcccgcgatccgttttatcgtgaagatttcacggtcctctaccgctggcctcacgctttacttagcaatgccagcgctccgcaaacgacgaatattttcagccatcttcttttaccctccacgagtagcttgttaatttggtttccgtgtctgttcctggtttgtggatggttatatctctggaagcgcaggccgcaatttacgccggtagatgtgattgaaaccgatgtcattccgccagattacacgcccggcatgttacgtctcgatgcgaagctagtttacgacgataaaggtttttgtgccgatatcgtaaatctgattgtgaaaggaaaaattcatctggaagatcagtctgacaagaaccagcaaatcctgattcgtgttaatgaaggcgcgaccagaaataatgcggtattactgcccgcagagcagttattactggaagcgttatttcgtaaaggcgataaggtcgttcttacggggagacgcaacagagtcttacgcagggcatttttacggatgcagaaattttatctgccgcgtaaaaagtctagcttttaccggtctgatacttttttgcaatggggtggactggcaatattggcggtcattctttacggtaacttgagtcctgtaggctgggcaggaatgagtctggtgggcgatatgtttattatgatctgctggattattccttttttattttgttcccttgagcttttgtttgcccgcgatgatgacaagccttgcgttaatcgtgtaatcatcactttgtttttaccactgatttgtagtggcgtggccttctattctctctacatcaatgtcggagatgtattcttttactggtatatgccagcgggttattttaccgctgtttgcctgaccggttatctcactggcatggggtatatttttctgccaaagtttacccaaactggacagcaacgttatgcccacggtgaagctatcgttaactatcttgcgcgtaaagaggcagcaacacacagtggacgtcggcggaaaggggaaacacggaaactggattacgcgttgctaggttgggctataagcgcaaatttggggagggaatgggcgttacgcattgcccctagcctttctagcgcgattcgcgctccagagattgcccgtaacggcgttttattcagtttacagacgcacctaagttgcggggccaataccagtttgttggggcgaagttattccggtggtggtgctggcggcggcgcgggtggcggaggcggtggtggctggtaattaagctgatgttaatcgaaacaagctttaaccataaagatagtgtagtatgttgcgcctcaaagccaggccgataaacgtcgagtcgtttacttaaggcctgaagagttcaaacagactttactatcagtgagtcagatgtaagttctgactcactgttgcacaaaagcatatcagacgcctgggaaggcgacaccaaaaggaagctctatgagcgaaaagctacagaaagtgctggcgcgtgccggccacggttctcgccgtgaaatcgaatctattattgaagccggtcgtgtgagtgttgatggcaaaattgctaaactcggcgatcgtgttgaagttacccctggattgaaaatccgtatcgatggtcacctgattagcgtacgtgagtccgctgaacaaatttgtcgcgttctggcctattacaaaccggaaggtgagttgtgtacccgtaacgatccggaaggacgtccaacggtgtttgaccgtctgccaaaactgcgtggcgcacgctggattgccgtgggtcgcttggacgttaatacctgtggtctgctgctgttcaccaccgatggtgaactggcaaaccgtttaatgcacccaagccgtgaagttgaacgtgaatatgccgtgcgtgtatttggtcaggttgacgacgcgaaactgcgtgatttgagtcgtggcgtgcagttggaagatggtccggcagcttttaaaaccatcaagttcagcggcggcgaagggatcaaccagtggtacaacgtgactctgaccgaaggccgtaaccgtgaagttcgtcgtctgtgggaagcggttggtgtgcaggtgagccgcctgatccgtgttcgttacggtgatatcccactgccaaaaggtctgccacgcggtggctggacggagctggacctcgcccagactaactatctgcgcgaactggtggagctaccgccagaaaccagctctaaagtcgctgtagaaaaagaccgtcgtcgcatgaaggcgaatcagattcgtcgtgcggtgaaacgtcacagtcaggtgagcggcggtcgtcgttctggcggacgtaataataacggttaatcaaagtatgccggacgtcatatccggcatttttacagattaataatcgatccctatctgcgcttttacaccggcatcaaacgcatgtttgacggggcgtaattcacttaccgtatctgccagttcaagaatatcccgatgacaaccacgacccgtgataatcaccgtctgttgatgtggacgttcatttaacgcctgcaccacttcttccagtggcaaatagtcatacgccaccatatacgtcagttcatcaagcaaaaccatatccagactggaatcagcaagcatccgctttgcatgttgccagacttcgcggcaggcggcggtatcagactcgcggttttgtgtatcccaggtaaagcccgttgccatcacctgaaactcaacgccatgtggctccagcagattgcgttcgccattaggccaggtgcctttaataaactgcacgacgcctactttttttccgtgaccaactgcgcgtgttgccgtaccaaatgccgcggtggttttgccttttccattgccggtaaagacgatgataataccgcgttcatcctgggcctgggccacacgagcatctactttttctttcactcgctgctgacgctgttggtagcgttcatcactcattgggaaattcctggtttacggcccggttgggcgtcaaaggtcatgccggttttacggcggctgtcatcgcccatcagccagaggtagagcggcatgatatcagcgggtgttttaagtttctgtggatcttcggtcgggaaggcgctggcacgcattgcggtgcgcgtaccgcctgggttaatgcagttgacacgcaggcgctgctgatattcatcggccagtacctgcatcatcccttcggtggcaaatttgctcgctgcatatgcaccccagttggctcgtccctgacgtccaacgctactactagtaaagaccagactaccggcgtcgcttttgagtaataaaggaagcagtgcctgggtgagcataaaggtggcattaacgttgacctgcatgacgtcctgccagacctgcggattttgttcgctcattgggcaaacatcgccgagcaatccggcattatgcaaaacaccatccagacgcggataattaacggcaatgcgctgtgccagttgttggcaattttcggacgtgcaggtcagcaaatcgagaataaaccactgtggctgacgcccagtttcttcgtttatgtggctggctacctgacgtaatttttcttcattacggcccaacagaatcactgtcgcaccatagcgtgcatacgtcatcgcggcttcacgaccaataccatcgctggctcccgtcaccaggataatgcgatcattgagtaaatcttgttttggctggtaatgcatggctactcctcaacgacgttgtctgtcgcgctgccagtgtactttatgactttggggctttatgcctgaaacagaagggcatttcaatcagcctggggcgataacaccgcaaaatggatactttgtcatactttcgctgcaataacatctctgcgagacggcttaacatgcctgttgtaaactgtgagccaaagcgttgtttaaccaaggtggggactcgtggaattgttgtctgaatatggtttgtttttggcgaaaatcgttaccgttgtgctagcgattgcggcgattgccgccattattgtcaatgttgctcaacgtaataaacgccagcgtggcgagttacgggtcaacaatctcagcgaacagtataaggagatgaaagaagaactggccgcggcgctgatggacagtcatcagcaaaaacagtggcacaaagcgcagaagaaaaagcataagcaagaagcgaaagcagcaaaagcgaaagccaaactgggcgaggtggcaactgacagtaaaccccgcgtctgggtgctggattttaaaggcagcatggacgcccatgaagtgaacagcctacgtgaagagataacggctgtactcgcagcattcaaaccgcaggatcaggttgtgctccgtctggaaagccctggtggcatggtgcatggttacgggctggcggctagccaactgcagcgtctgcgcgataaaaacattcctttaactgttacggtagacaaagtcgctgccagcggcggttacatgatggcctgtgtggcggacaaaattgtttccgcaccgtttgctattgtgggttccattggcgtggtggcgcaaatgcccaactttaaccgcttcctgaaaagcaaagatattgatatcgaactgcacactgccgggcagtataagcgcacgctgacgttgctgggtgaaaataccgaagaagggcgggagaaattccgcgaagagttgaacgaaacgcatcagttgtttaaagattttgtgaagcgtatgcgtccttctctggatattgaacaggtggcaacgggtgaacactggtacggacaacaggcggtagagaaaggcctggttgatgaaatcaacaccagtgatgaagttattcttagcctgatggaaggccgtgaagtggtcaatgtacgctatatgcagcgtaaacgactcattgaccgattcaccggcagcgcggcagagagcgccgatcgattgttgctacgctggtggcagcggggtcaaaagccattgatgtaaaagacaaacgcgaggctaagacctcgcgttttgctttaatcaaccagatgatatttttcactaagcacatgggccaggtgtttgaacatattaaacaccgcggtgcttttggctgttggcaatccttgttcatctaaaaagtagtcgccggtaaataccagcacgccattacgctgcgtgacgccggtggcttcaatccctgcgagcgtatcctcatgctcacgaatgattttgttggcctctttcaacagcgtttcgcggtcgatgggttgtgtctctttgttcattatttactccttaaacaaggacattagtctacgccaggcatggcttgcagacaaatataccacgctggtggcaagagcgccttactggcaactttggattttgcatgctaataaagttgcgtatcggattttatcaggtacagtgtgacgctttcgtcaatctggcaatagatttgcttgacattcgaccaaaattccgtcgtgctatagcgcctgtaggccaagacctgttaactcagtcacctgaattttcgtgaacagagtcacgacaaggggttgatatccgcagagagcgagtccatatcggtaactcgttgccagtggaaggtttatcaacgtgcgacgcattcctggaagaatcaaattaggtaaggtgaatatgggtaaagctcttgtcatcgttgagtccccggcaaaagccaaaacgatcaacaagtatctgggtagtgactacgtggtgaaatccagcgtcggtcacatccgcgatttgccgaccagtggcagtgctgccaaaaagagtgccgactctacctccaccaagacggctaaaaagcctaaaaaggatgaacgtggcgctctcgtcaaccgtatgggggttgacccgtggcacaattgggaggcgcactatgaagtgttgcctggtaaagagaaggtcgtctctgaactgaaacaactggctgaaaaagccgaccacatctatctcgcaaccgaccttgaccgcgaaggggaagccattgcatggcacctgcgggaagtgattgggggtgatgatgcgcgctatagccgagtggtgtttaacgaaattactaaaaacgcgatccgccaggcatttaacaaaccgggtgagctgaatattgatcgtgttaatgcccagcaggcgcgtcgctttatggaccgcgtggtggggtatatggttagcccgctgctatggaaaaagatcgctcgtggcctgtctgccggtcgtgtgcagagcgtggcggttcgcctggtggtcgagcgtgagcgtgaaattaaagcgttcgtgccggaagagttctgggaagtcgatgccagcacgaccacgccatctggtgaagcgttggcgttacaggtgactcatcagaacgacaaaccgttccgtccggtcaacaaagaacaaactcaggctgcggtaagtctgctggaaaaagcgcgctacagcgtgctggaacgtgaagacaaaccgacaaccagtaaacctggcgctccttttattacctctacgctgcaacaagctgccagcacccgtcttggatttggcgtgaaaaaaaccatgatgatggcgcagcgtttgtatgaagcaggctatatcacttacatgcgtaccgactccactaacctgagtcaggacgcggtaaatatggttcgcggttatatcagcgataattttggtaagaaatatctgccggaaagtccgaatcagtacgccagcaaagaaaacagtcaggaagcgcacgaagcgattcgtccttctgacgtcaatgtgatggcggaaagcctgaaggatatggaagcagatgcgcagaaactgtaccagttaatctggcgtcagttcgttgcctgccagatgaccccagcgaaatatgactccacgacgctgaccgttggtgcgggcgatttccgcctgaaagcacgcggtcgtattttgcgttttgatggctggacaaaagtgatgcctgcgttgcgtaaaggcgatgaagatcgcatcttaccagcagttaataaaggcgatgctctgacgctcgttgaacttacaccagcccagcactttaccaagccgccagcccgtttcagtgaagcaagcctggttaaagagctggaaaaacgcggtatcggtcgtccgtctacctatgcgagcatcattagcaccattcaggatcgtggctacgtgcgagtagaaaatcgtcgtttctatgcggaaaaaatgggcgaaatcgtcaccgatcgccttgaagaaaatttccgcgagttaatgaactacgactttaccgcgcagatggaaaacagcctcgaccaggtggcaaatcacgaagcagagtggaaagctgtactggatcacttcttcagcgatttcacccagcagttagataaagctgaaaaagatccggaagagggtggtatgcgcccgaaccagatggttctgaccagcattgactgcccgacttgtggtcgcaaaatggggattcgcacagcgagcaccggggtattccttggctgttctggctatgcgctgccgccgaaagagcgttgcaaaaccaccattaacctggtgccggaaaacgaagtgctgaacgtgctggaaggcgaagatgctgaaaccaacgcgctgcgcgcaaaacgtcgttgcccgaaatgcggcacggcgatggacagctatctcatcgatccgaaacgtaagttgcatgtctgtggtaataacccaacctgcgacggttacgagatcgaagagggcgaattccgcattaaaggttatgacggcccgatcgttgagtgtgaaaaatgtggctctgaaatgcacctgaaaatggggcgtttcggtaaatacatggcctgcaccaacgaagagtgtaaaaacacacgtaagattttacgtaacggcgaagtggcaccaccgaaagaagatccggtgccattacctgagctgccgtgcgaaaaaagtgatgcttatttcgtgctgcgtgacggtgctgccggtgtgttcctggctgccaacactttcccgaaaagccgtgaaacgcgtgcgccactggtggaagagctttatcgcttccgcgaccgtctgccggaaaaactgcgttatctggccgatgcgccacagcaggatccggaaggtaataagaccatggttcgctttagccgtaaaaccaaacagcaatatgtctctagcgaaaaagacggaaaggcgactggctggagtgcattttatgttgatggcaaatgggttgaaggaaaaaaataacctttaattctgtcaggtttttataaacaaagggtcgcgaaagcggcccttttttattgcatattattttttcttcacacctatacactaaggctataaatgatatagtggttatagttagcaccttttttattattaaatcgtattagtcacccgccaggtgtgacgaaaaaacgatgttctgatggcgtctaagtggatggtttaacatgaaattacaacaacttcgctatattgttgaggtggtcaatcataacctgaatgtcagtagtacagcggaaggactttacacaagtcaacccgggatcagtaaacaagtcagaatgctggaagacgagctaggcattcaaattttttcccgaagcggcaagcacctgacgcaggtaacgccagcagggcaagaaataattcgtatcgctcgcgaagtcctgagcaaagtcgatgccataaaaagcgttgccggagagcacacctggccggataaaggtagtctgtatatcgccaccacgcatacccaggcacgctacgcattaccaaacgtcatcaaaggctttattgagcgttatcctcgcgtttctttgcatatgcaccagggcagcccgacacaaattgctgatgccgtctctaaaggcaatgctgatttcgctatcgccacagaagcgctgcatctgtatgaagatttagtgatgttaccgtgctaccactggaatcgggctattgtagtcactccggatcacccgctggcaggcaaaaaagccattaccattgaagaactggcgcaatatccgttggtgacatataccttcggctttaccggacgtagtgaactggatactgcctttaatcgcgcagggttaacgccgcgtatcgttttcacggcaacggatgctgacgtcattaaaacttacgtccggttagggctgggggtaggggtcattgccagcatggcggtggatccggtcgccgatcccgaccttgtgcgtgttgatgctcacgatatcttcagccacagtacaaccaaaattggttttcgccgtagtactttcttgcgcagttatatgtatgatttcattcagcgttttgcaccgcatttaacgcgtgatgtcgttgatgcggctgtcgcattgcgctctaatgaagaaattgaggtcatgtttaaagatataaaactgccggaaaaataatttcttgcgttattttcggcaccttttatgtagcgaaggtgccggaatatattctcttttgttacttatttctataccgtgcacaatatttttatccctcatatttatagggtaaattacctgtaaagtagtgtctaattacccgcctcgcaaactccagttttcaaatatctatttcaggtcaaaagattgaattattcactggagacgattcgtaaattcgctggatttttgactaaagtttctttaggatttgtctcatcgtatgattaattacaccaatcgttcaacgtcttgctgataagtgatggcgattatatgaggttagcaatgccttctggaaatcaggaaccccgccgcgatcctgaattaaaacgtaaagcctggctggcggtttttcttggttctgcacttttctgggtggttgtcgcactgctgatttggaaagtgtggggataactatggtcggtcaggagcaactggagtcgtcaccattatgccagcatagtgacaatgaaacagaaacgaaacgggaatgttccgtcgttattccagacgactggcaactaacatcgcagcagcaagcctttatagaactgtttgctgaagatgatcagccgaaacaataattatcatcattcttattacccatttttaatgaattaaagggcttttaatacaccgcagcaataacagcttgagttatctcaacacaaaataataaccgttaagggtgtagcctatgatcaacacaaatatgaaatattggtcctggatgggcgcgttttctctgtcgatgctcttctgggccgaactcctctggatcattactcactgatccttgaccccgctgcggcggggttgtcatttgctttgccacaaggtttctcctcttttatcaatttgggttgttatcaaatcgttacgcgatgtttgtgttatctttaatattcaccctgaagagaatcagggcttcgcaaccctgtcattaaggaggagctatgagcagtaccctacgagaagccagtaaggacacgttgcaggccaaagataaaacttaccactactacagcctgccgcttgctgctaaaagtctgggcgatatcacccgtctacccaagagtctcaaagttttgctcgaaaacctgctgcgctggcaggatggtaacagcgttaccgaagaggatatccacgcgctggcaggatggctgaaaaatgcccatgctgaccgtgaaattgcctaccgcccggcaagggtgctgatgcaggactttaccggcgtacctgccgttgttgatctggcggcaatgcgcgaagcggttaaacgcctcggcggcgatactgcaaaggttaacccgctcagtccggtcgacctggtcattgaccacagcgtgaccgtcgatcgttttggtgatgatgaggcatttgaagaaaacgtacgcctggaaatggagcgcaaccacgaacgttatgtgttcctgaaatggggaaagcaagcgttcagtcggtttagcgtcgtgccgccaggcacaggcatttgccatcaggttaacctcgaatatctcggcaaagcagtgtggagtgaattgcaggacggtgaatggattgcttatccggatacactcgttggtactgacagccacaccaccatgatcaacggccttggcgtgctggggtggggcgttggtgggatcgaagcagaagccgcaatgttaggccagccggtttccatgcttatcccggatgtagtgggcttcaaacttaccggaaaattacgtgaaggtattaccgccacagacctggttctcactgttacccaaatgctgcgcaaacatggcgtggtggggaaattcgtcgaattttatggtgatggtctggatagtctaccgttggcggatcgcgccaccattgccaatatgagcccagaatatggtgccacctgtggcttcttcccaatcgatgctgtaaccctcgattacatgcgtttaagcgggcgcagcgaagatcaggtcgagttggtcgaaaaatatgccaaagcgcagggcatgtggcgtaacccgggcgatgaaccaatttttaccagtacgttagaactggatatgaatgacgttgaagcgagcctggcagggcctaaacgcccacaggatcgcgttgcactgcccgatgtaccaaaagcatttgccgccagtaacgaactggaagtgaatgccacgcataaagatcgccagccggtcgattatgttatgaacggacatcagtatcagttacctgatggcgctgtggtcattgctgcgataaccagctgcaccaacacctctaacccaagtgtgctgatggccgcaggcttgctggcgaaaaaagccgtaactctgggcctcaagcggcaaccatgggtcaaagcgagcctggcaccgggtagcaaagtcgtttctgattatctggcaaaagcgaaactgacaccgtatctcgacgaactggggtttaaccttgtgggatacggttgtaccacctgtattggtaactctgggccgctgcccgatcctatcgaaacggcaatcaaaaaaagcgatttaaccgtcggtgcggtgctgtccggcaaccgtaactttgaaggccgtatccatccgctggttaaaactaactggctggccagcccgccgctggtggttgcctatgcgctggcgggaaatatgaatatcaacctggcttctgagcctatcggccatgatcgcaaaggcgatccggtttatctgaaagatatctggccaagcgcacaagaaattgcccgtgcggtagaacaagtctccacagaaatgttccgcaaagagtacgcagaagtttttgaaggcacagcagagtggaagggaattaacgtcacacgatccgatacctacggttggcaggaggacagtacctatattcgcttaagccctttctttgatgaaatgcaggcaacaccagcaccagtggaagatattcacggtgcgcggatcctcgcaatgctgggggatagtgtcaccactgaccatatctctccggcgggcagtattaagcccgacagcccagcgggtcgatatctacaaggtcggggtgttgagcgaaaagactttaactcctacggtagccggcgtggtaaccatgaagtgatgatgcgcggcaccttcgccaatattcgcatccgtaatgaaatggtgcctggcgttgaaggggggatgacgcggcatttacctgacagcgacgtagtctctatttatgatgctgcgatgcgctataagcaggagcaaacgccgctggcggtgattgccgggaaagagtatggaagtggctccagtcgtgactgggcggcaaaaggtccgcgtctgcttggtattcgtgtggtgattgccgaaagctttgaacgaattcaccgtagcaatttaattggcatgggcatcctgccgctggaatttccgcaaggcgtaacgcgtaaaacgttagggctaaccggggaagagaagattgatattggcgatctgcaaaacctacaacccggcgcgacggttccggtgacgcttacgcgcgcggatggtagccaggaagtcgtaccctgccgttgtcgtatcgacaccgcgacggagttgacctactaccagaacgacggcattttgcattatgtcattcgtaatatgttgaagtaacaactatttgcttgccggttattttgcttccggcaagcaaatgaattacacaatgcaagagggttatttgttcagcaaatggcccattttctcggctttggtatcgagataatgttcgttattggggttacgacctacaatcaatggtacgcgttcaacaatattaatccctgcttcggtcagaatttcgacttttttcgggttattggttaacaagcggacttcattgacgccaaggagtttgaacatatcagcgcaaagagtgaagtcgcgctcatcagcggcgaagcctaactggtggttagcctctacggtatcgtaaccttgatcctgcagtgcgtaagcgcggattttattcagcagaccaatgttacgaccttcctgacggtgatacagcaaaataccacggccttcctcggcaatttgcgtcaatgccgcttcgagctggaagccacaatcgcagcgcaagctgaacagggcgtcaccggtcagacattcggaatggacgcgcgcaagtaccggggtatgcccggaaatatcgccatagactagcgcgacatgatcgtgtccggttgccagttcttcaaatcccaccatcaggaaatcgccccatggggttggcagtttggcttctgccacacgtttaagctgcatgaaattctccagataatgctggttctgtattggcttattttgccataacgagaaggggttcacctaatcacgacgcgtcgatcgttcacggaatggcacaaatctgtcaatttttcctggaactggcgttttcagttatgattgtgggacttatcaaaaaggagaggccatgcgtagcattgccagacgtaccgcagtgggagctgcactattgcttgtcatgccagtagccgtatggatttctggctggcgttggcaacctggagaacaaagttggctactaaaagcggctttttgggttactgaaactgtcacccagccctggggcgtcattacacatttgattttattcggctggtttctctggtgtctgcgttttcgcattaaggctgcctttgtattatttgccattctggcggccgcaatccttgtgggacaaggcgttaaatcctggatcaaagacaaagtccaggaaccacgaccttttgttatctggctggaaaaaacacatcatattccggttgatgagttctacactttaaagcgagcagaacgcggaaatctagtgaaagaacagttggctgaagagaaaaatatcccacaatatttgcgtagtcactggcagaaagagacggggtttgcctttccttccggtcacacgatgtttgctgccagttgggcactgctggccgttggtttgctgtggccgcgtcggcgaacgttaaccattgctatcttgctggtctgggcaacgggagtcatgggaagccgcctgctgctcgggatgcattggccacgcgatctggtagtagctacgttgattagctgggcgctggtggcggtggcaacgtggcttgcgcaacgaatttgtgggccattaacaccacctgcggaagaaaatcgcgaaatagcgcaacgagaacaagaaagttaacgctggttgattttccgaatttagcccttaaatcatcaacaatgcgtgtggatgccatttcgcagacggcgcgaaaatggtactttaaagggctattgcggtaagttgaccataatttattcgctctaaccacataacgggaagtaatgtgaaatatttactcattttcttactggtgttagcgatcttcgtgattagcgtcacgttgggtgcgcagaacgatcaacaggtgacgtttaattatctgttagcgcaaggggagtaccgtatttccacattgctggcggtattgtttgctgcggggtttgctatcggttggttgatttgtggcctgttctggctgcgagttcgtgtttccctggcgcgcgctgaacgtaaaataaagcgactggaaaaccagcttagtcccgcgactgacgtggctgtagtgccgcacagcagtgcggcgaaggaataactttctatgctggagttgttgtttctgcttttgcctgtagccgctgcctatggctggtatatgggccgcagaagtgcgcaacaaaacaagcaagatgaagccaaccgcttgagccgtgattacgtagcgggggttaacttcctgcttagtaatcaacaggataaagcggtagacctgtttctcgatatgcttaaagaggatacaggcaccgttgaagcccaccttacgctcggaaacctgttccgtagccgtggcgaagttgatcgcgctattcgcatccatcagaccctaatggaaagcgccagcctgacctatgaacagcgtctgttggcgattcaacaactggggcgtgattacatggccgccgggttatatgaccgcgcggaagacatgttcaatcagctgaccgatgaaactgacttccgcattggcgcgctgcaacagttgctacaaatctaccaggctaccagtgagtggcagaaagcaattgatgttgccgaacgcctggtgaagctgggtaaagataaacagcgcgtcgaaattgcccatttctactgtgagttagccctgcagcatatggccagcgacgatctcgatcgtgccatgaccttgctaaaaaaaggggcggcggcagataaaaacagcgcccgcgtatccataatgatgggacgcgtgtttatggcgaaaggagaatacgccaaagccgtcgaaagtctgcaacgcgtgatatcccaggacagagaactggtcagcgaaacgctggaaatgttgcaaacctgctatcagcagttgggtaaaactgccgaatgggcagaattcctgcagcgtgcggtggaagagaacaccggtgccgatgctgaattgatgcttgctgatatcatcgaagcgcgcgacggtagtgaggccgcacaggtctatattacgcgccagcttcagcgtcatccgaccatgcgtgtgttccataagttaatggattaccacttaaatgaagcggaagaagggcgtgccaaagagagcctgatggtgctgcgtgacatggttggcgagaaggtacgtagtaagcctcgttatcgttgccagaaatgtggttttaccgcatacaccctctactggcattgtccgtcttgtcgggcctggagtaccattaaaccgattcgcggtcttgatggcctgtaatttttaaaaaaaatccgactttagttacaacatactaattattaatgttccattgtgctccggcaacgacggcgcagaaaaagcctgccaggggagaaatcgcaactgttaattttttatttccacgggtagaatgctcgccgtttacctgtttcgcgccacttccggtgcccatcatcaagaaggtctggtcatgacgttaactgctagttcttcttcccgcgctgttacgaattctcctgtggttgttgcccttgattatcataatcgtgatgacgcgctggcctttgtcgacaagatcgacccacgcgattgtcgtctgaaggtcggcaaagagatgtttacattgtttgggccacagtttgtgcgcgaacttcaacagcgtggttttgatatctttcttgacctgaaattccacgatatccccaacactgcagcgcacgctgtcgctgctgcagctgacttaggcgtgtggatggtgaatgttcatgcctctggtggggcgcgtatgatgaccgcagcgcgtgaggcactggttccgtttggcaaagatgcaccgcttttgattgctgtgacagtgttgaccagcatggaagccagcgacctggtcgatcttggcatgacactgagtcctgcagattatgcagaacgtctggcggcactgacgcaaaaatgtggccttgatggtgtggtgtgttctgctcaggaagctgtgcgctttaaacaggtattcggtcaggagttcaaactggttacgccgggcattcgtccgcaggggagtgaagctggtgaccagcgccgcattatgacgccagaacaggcgttgagcgctggtgttgattatatggtgattggtcgcccggtaacgcaaagcgtagatccagcgcagacgctgaaagcgatcaacgcctctttacagcggagtgcatgatgagtgattccaacagccgtctggtctacagtacggaaaccggacgtattgatgagtccaaagcggcccctgtacgccctaaaggcgacggtgtggtgcgtattcagcgtcagaccagtggacgtaaaggtaagggcgtttgcctgattaccggtgtcgatctcgatgatgccgaactgacaaaacttgcagcggaactgaagaaaaaatgcggctgcggcggagcagttaaagatggagttattgaaatccagggcgataagcgtgatttattaaaaagtctacttgaagcgaaagggatgaaggtaaaactcgcaggcggttaacataaaaagccacggatatatccgtggctttcgaatattttactgtgcgtattattcagttatttcgtactgaacagaatcaagcgtattataattgcgagtcgataatcgacatttatttacgattatttaccgacctggtgaccaataacacctccgacagctgcaccacctaatgtacccaacgtactgccatcggtcagtactgcaccgcctaatgcccctgcacccgcgccgattgcggtgttgcggtcccgtttagaccagttagaacaggcactcagagacattgccaaagtaattgccagaacagccgcggtcatttttttgctcgttacaaacataatactctctcctgaatttatgattcacggaagtaagctctctataactataatagctaagaataagtctggtgaaattattccgtgaaatctgctcgcgcgcagggttatatcacgcaggtgataatgacttcctgttatatcgctgataataattttatatcttgagagtgttaataacaggtaaatagtcttaattatcaaccaggaatcatcttagagcggatgatttgccaaactgcaaatcatccgtagagaagggaaatggttaaatgtcaacgacgtgaatggtgagtttactgtgctcaagatgcatcagatcgctggcgcgtattttgctatcggtaatcacgcgattgaatcgctcaacgggaccgatggagtaactatgtacagcaccaaatttgctgctgtcagtcaggactatcgcttcgcactctttttccagcacggcattgaccacatcggtacgcatcatatcgcgaccggtaaatccagtttcaggttgccagccatcaataccaataaatgctttgctgaaatgcacctgttggatgcactggcgtgtcaaagggccaaccatactttcgctttttttctgatacacgccaccgagcaaaataacttcacaaggcgcgtctttcagcaaatgcgcgatgtagctgctgaccgtgatgatagtgacatttttcttctgctcgcccagagtccgggcgagtagggcattgctgctgccattttcgataaagatggtttcgcccggttgaaccaggctcgcggcaaactcggcgagttcacgcttcagcgtatagttgctcatcatacgggtttcgacgtcatcactatcaaggctaacagcaaagccatgtgcacggcggaggtaactcagtttttcgagtgtgttgagatcctggcgaatggtaacttcagaaactccagtggcttttgccagatcggttacgctaacctgaccctggtcaatgaccatctgtagaatagtttgttgtcgggaattcatcgctgtaattcttataacgttataatacttaataaaaaaatactgacgcgccgggcatcctcaaataggaaaacctgaaggcacgattgttaaatctcccacggtgccttcgggatgtctggcgtagattcagcaacctggcgcaagagttctgctttaagtatctcgagattatggatcgcagagtggtaatcgcctgccacaaggatatctaacacaatatcaatacgttcggcaacgcgctgggcatcaaattcagacatcaaggacatccttatagcaaaagggggaaaatgaataatgcaaaaattgccgctaaaagagaagtgtttaacagcaacggctaattatcatccaggaatacgatatataatgacgggatatagcgctaagtatatatattcatctacttatgcgcgcttcagatagcgtttataccagcgttcgaaggcgacggcgggcatcggtttggcaaacaaaaatccttgccgctcattgatcccgttcttggttaaaaaagcatcttcctttgcactctctacaccttcggcgatcacctgaagattcaatgcctgggccacagcgacgatcgcccggaccagactctggctgacaggttgtttgtgaatatctcgaacaaaaacctggtcaagtttgatggcatcgatcggaaagcgcgccagttggctaagactagagtagccggtaccaaaatcatccagatgcacttgcgcacctagttggctaaattgttgaataacagacagtgccagttcatcattctcaatcagacaactctctgtcagttcaacatctatagggcagtattcaaaattgagttcctggagaacctgtttcagggcggtgaaaatggtttgatcggcgagctgacgtgcagaaatatttaccgccactcgcaggtttatgcctttatcccgccactttgccacctggcgtacgacatcgagaatcacccaacggcctaaaggcacaattagcccactctcttcggcgtaggaaatgaagtccaacggtggaatcaacccacgttcaggactctgccaacgtactagtgcttccagactgcgcacttcgccacgccaggtgattttcggttgatagtgaataaccaactgatcgttttccagtgctttacgcaagttggtatccagccagagatattcaaatacccgttgattcatttctggggtaaaaacgcaaaattgtcctcgtccgccttccttcgctgtgtacattgctgtgtcggcgtgacgaataatagccgtgctgtcactaccatgttcgggagagagtgcaatacctacactacagctggtataaacttcaattaaaccaatgcgaaaggggagccgtaagcgggtcaaaattcgacttgccattgcttccagcgcgctttgactggtgttggatgccagtaccagaaactcatccccacctggacgagccaacacctggtcatgttcgagacagcttaaaatagccaaactcacgtcgcgtaataactggtcaccaaacaaatgcccataggcgtcgttgacctttttgaaattatccaaatcaagatacacaaccccaactttattgttatctgcatgattaatagcgtgatcgattaaatcctgcattgcgttacgattcggcagtccggtgatactgtcggtatttgccagaatacgcagtcgctcctgagcgcggcgctcttcggtaatgtcggtgccggaacagattaaaaaaatctcgtttttgccactgccgctgtggacaaatttattgcgaaacagaaacagccgctggcctttacatgttggtatccacagttcgacttcatatgcattgccgcttcgaaaaaatacacggttattgcgcctggatgccgcagcttcacgacggctcataaacagtttaaacacgctttgcccaatgacgtcgtgttctttcaaccctgtgtaatcttcacataaccgattgaagcgttggatattcccccggctgtcgagaatcactattgcggaatgtgcttcagaaactacctgctcagcaaaggaaagcccgtgacttaaatcacgagcaaccgccggtgtgtcatgccatgcagacgcgttgccagcccattcccgtttattgatttttcgtcctaccagatgcacagaaagatcgctttcatcgacggtcagactcatcatcaggctggaggtgatgaccgtcatttccctgatgcgagcagcctgttcggcagataactgcaatgtacgatcaggttctgtggtttcggtggtagaaaagcgcaaaacatcgctgctttccgtcaaccgccagtatggattgtggcttccgagaaagttgtacaacgttgtggactccctaacggttttcatgatgcatatcctccggttaacagcggagtccgcggttaaataaaaggaacaacatgacttacatgaaattaacggcggctaaacgcattgttttttttatatatttatttgtaatccagttttggaaaaacgccagttttcaaacgaaagtcagttaaaaaatctgcctggatataacgaaggtagagcggggaaataaacggcccatccatgaggaatgggccgtgaaaggagattacgcgaccgggcgcgcaataatgctgcgggtttccatgcggacttcggcaatagtgacgtcaataacgtcagtcactttgtaaaccgtttcacctttaatttgtacagtgccgttttcctggctgcaaaccagttcatcgcgcacagcgtgtaagaaaggtgccggaataaaggcgatagcgccgttatcaaccaaacgaacacgcatgccgccacggctgatatcgacaatttccgctgcgaaacgggtgtcggtcccggctttgtctttcaggaagcgtgcgtataaccagtcaccaacatcacgttctgccatccggttgagacggcgacgctcggccatttggacagtgatttcatcctgtgggcgcgtcgcagtttcgcctttgataaccgctttcagcagacggtggttgatcatgtcgccatatttacggatcgggctagtccaggtggcgtatgcttccagaccgaggccaaagtgaggaccgggttcagtgctaatttcagcaaaactctggaagcgacgaatgcggctgtcgaggaaaccagttggttgcgcgtccagttcacgacgcagtttgcagaaaccgtccagcgtgagcacttcttcggcatcgacatgcagaccgtgcgttttcagcaacgctgccagcgcgtcggcattcgccggatcaaagcccatatgcacgttatagatgccaaaaccgagcttatcgcgcagtacgcgggccgcacaaatgttagcggcaatcatcgcttcttcgacgatacggttggcaatgcgacgaggctcggcgacgatatccagcacttcacctttttcaccgagaataaagcggtaatccgggcgatctttaaacaccagtgcgtggttatgacgccactcgccgcggcgttggcaaatttgcgctagcaaacggacttgttcggcaattgcttcactttcaggctgccagtcaccggtattttccagccagtcagaaacctggtcatacaccagctttgctttggattcgatggtggcggcaaagaattcgatattatcttcaatggtgccatcagcggagagcgtcatgcggcatgccagtaccgggcggacttcattggcgcgcagactgcagagatcgtcagaaagctcgcgaggcagcatagggatgttgaagccaggcagatagttggtgaatgcgcgaattttcgcggctttgtccagcttgctgccttcagcaatccacgcggttggatcggcaatcgccacaatcagctgaagtttgtcatccggcaacgccttagcgaaaagggcgtcatccatatcttctgtgctggcactgtcgatggtgacaaaatccagcgcggtcagatcttcacgaaccagaccttcatcgagcatttcggtagcgacgccgtctggtgcttctttttccagattatggcgtgcaagggtaacccaccacggtacaaagtgatcgtcaccaaaagtgatgtattgtgtcagttctgcatagaaagaacgatcgcctttcagcggatgacggcgcatttcggcaaccgcccagtcgccttctttaaactcgtggttcaggccacgggctgcgcggcaaggaatggcgtcttttaagagtggatgatcaggaacgatggccagacggtcatttttgccctgaaccttacccacgaaacgagtcaggaacggttcaaccagttcttctggctctgcggattcacgttctttttcactgtggatcaccgcgataattcggtcgccatgcatgacttttttcatctgcggcggcggaatgaaataacttttttgcgcgtcgacttccaggaagccaaagcctttttctgtggcttttaccaccccttcagcgcgtggcgtctgggaatgcagttgctgtttaagctgcgctagcagcgggttgtcctgaaacataattgtctattttggtggccattagagcggctgacagttttacgcgaatctgtctgacgcggcaaggttaatatgtctcacccaacgcgatttttaagcgatttatccagccacacagcccgctccataccagcagattaataatctgcgtactacttttttcgtgttcgagtaaagggctgaactgggcggcgctaaagcgatcgggtgctcgggtcagccattgtatcgcctgaacggtagcgcgctcaacagaatgacggtcagcccattggttaatttcattttcgcccttgcgcataagggtgctgatttttttatattcattactactatccatacaggtggcaaaacaagcaggactgccatttatacgcgcgcataacaacgccgcaagctgattatccggctgtgtattgccccgtgtgctgtttaacaacttttcgagaagggaaagactaatagggtggagagagagtatttcggccagttggcaaagttctgcagtactactttttgtgtgctcttcaggtagtttttccacctcatagctgcttcgccagcgtaaactttcatcagcaaacagactcgcgtcggcgtagttttgtatctccagcccgggtaaccagcgtaccggatgcccgagataagcctgaaatgtcgcaattgtccgcgcctgaaagccaataaaaccaatgatttggctaatgatcacacagtcccaggcagtaagaccgacgtcattcagatgctggcggcttcggttgtcgataatagaagggctgctagccagttggcgggcatattgcgtgatttgtgccaaccgatgattactttccctggtggaatcaggcccggggagcggcgtaagtcgcgcgctatagtagttacataaccgctggacgccgcaaacctgagcaaccgtcagggccgtgctcaagcgttcataagcggtgaaggtctgactacgggtcacggtaagctggtcagggaacaaatccactgcaagaacacgcgcagggtccagccaactaaggaagggggccagcgtttctttttcaaggatcacgtcgagtagaaagggatcgctgacctttgcggcttccgggaccagaggcagaacgtcatactccgtagtactggattgcgtttcatgataccagtggcttttgccggtgatgtggcgttgttccatgggcgctccttggtcgtaaaggaaatcgttatcctgacgcaaggcgggaaggggagaaagacggatcggcgataacaaatatcagaaaggtataacagagataacgggcggcagaacgccgcccatctttaccaacagaacgattatttcagttcgagttcgttcattgcagcaatgctgaaaccgccgtcaacgtggaccacttcaccggagataccggcagagagatcggagcacaggaatgccgcagagttacccacatcttcaatagtaacggtacggcgaatcggggtaacggcttcgcaatgagccagcattttgcggaagtctttgataccggaggccgccagagtacggatcggaccagcagagatggcgttaacacgcacaccttccggacccatcgcgttcgccatatagcgcacgttcgcttccagagacgcttttgccagacccataacgttgtagttcgggatagcgcgctcagcgccaaggtaggaaagggtcagcagggcagaacccggattcagcatggagcggcaagcttttgccattgcaacgaagctgtaggagctgatgtcgtgggcaattttgaagccttcacgggtaacggcgttaacatagtcaccatccagctgatcgccaggtgcaaaaccaatagagtgtacgaaaccgtcaaatttcggccaaactttccccagttcagcgaacatggtgtcgatgctggcatcttctgcaacatcgcactgcagaacgatgtcagaacccaattgagcggcaaattcttctacgcggcctttcagtttgtcgttctggtaggtgaatgccagttcagctccttcgcggtgcatcgcctgagcgataccgtaggcgatggatagtttgctggcaacaccggttaccagaatgcgcttaccggaaagaaaacccatagctttaatccttattgttgatgcttgttgtgcctgaaaatcaggcgattcgtcgttttagtaaacagtacgaacagataaacggttattataatcaacctggctgtgagtagctatagttgccaggtccgaccggagcaggctgcggcagggggggcgcttttcccctcaccctaaccctctccccagaggggcgaggggaccgtattgtgcaaatattgttaccccagcaacaaacaggctcatacagcccctaaccctttcatggcgatggctgggacggttcagaccttgccgaatattctccagcaccgtctccatgttttcaccacaacagctattcggctcggtctgccccctcgctctttcagggagagggactccggcggttcagttcctgcagaatattctccagcaccgtctcctcattacaatcaatctcgttattccagaaacgcagcacggtccagccctggctctcaagccagctagtgcgcctggaatcataggcaactgctaaatcatgctgcccaccatccagctcaacgactacacgcgcgctgcagcaagcaaaatcgagaatgtagctccccactggatgttgacggcgaaatttgaaatcactaaaacgtcggctgcgaagatatcgccagagctttcgttcctgcaaagtgagattgcgtcttaaatcacgcgcattacttttaattttatctatcacctcattctgacaagatttaatcttttgtcagaatgaggtgaataatctggaaggaggattcagaaaattagcgatctttacgccacgcatccgccgtcaatgcctcgccaaaatgaccggcaatcagccgtttggtgagttcatgcagcgggcttgccagcacatccgcggtgctgcctcgctcgacaacctcgccctgatgcatcaccagcacctggtcgctaatgtgcttcatcattccgatatgctgggtaacataaatatagctaatgccctgtttttcctgtaattccagcatcagattaatcaactggctacgcatgctcatatccagactagcgagggcttcatcggcaataatgacttttgggcgcaatatcagcgcgcgcgccagacccagacgctgtttttgtccgggtgccaacatatgcggatagtaactgacgtgatccggtagcagcccaaccatacgcatcgtttcaataatctgtttgcgacgctgttccggttccaggtcggtgttcaggcgcagtggaaaatccagaatttggctgatacgttgacggggattcaagctggtgctaggatcctgaaaaatcatgcgaatacgctgactgcggaaggaataatcgccaaaatgcagtggatgatcgtcaatcaataactcgccgctggtaggctctatcattcccgccagcatttttgccagcgtggatttaccgctaccattctcgccaataatcgccagtgtctggccttcacgtagcgtaaagctcaagggttttaccgcttctacggtctgacgacgaaaccagccggtccggtagcggaacgttttacttaaattacgcacttcaagcagcgtttcgatcatctcactctttctccatgttcagcgggaaatgacaggcatagagatgatttttcgcccccgtcaaacgtggcgtcacaatgcattctcgttgtgcatacgggcaacgtggccccagacgacaaccaatcggtaactgttccagcagtgggatagcgccgggcagcgtattgaggcgacttttatgcggcatcgcgctgccgaagtctggtatcgcgcggatcagcgcctgggtataaggatgatgtggcatcgtcaccaactccttactcggcgcggtttccactgtttgaccgcagtaaagcacgttaattttatccgcccattggctaagcatttgtaagtcatggctgataagcaaaatagtggtattgctgttttggttgagacgcgtcagcaggcgaaagatttgcgcctgggttgttggctccatactgttggtcggttcgtcagcaatcagcagacgcggttgattcgccagtgcaatggctatcatcactttctgacattcaccttcggtcaactcatagggaaaactgcgcatcgcatctttgtgatctttaatccccacgcggtgcagcagttcaatggcacggcgtttgcgccagccaaaacgctgccaccaacggcctttataggtccaggctgggatgttttgcatcaactggcggcccacacgttcactagggtcaagacagctctgcggttcctggaaaatcatgctcacgttatggccaaccagtttgcgccgttcgcgtgcggagagacgcagcaaatcgatatcatcaaaacgcatacggtcagcagtaacacgccagttatctttattcaccccacaaatcgctttcgcaatcaaactcttgccggaaccggattcaccaacaagaccgcggatttcaccttcggttaaggtcatacttacccggtcgacggctttaacccactcatcaccggttttaaattcaatggtcaggttacgaatatcgagtaatggcattattccacccccgcaataatcgcacgacgaacgccatcgccaaggaggttaaccaacaacacgctaatcataattgccgcacctggcagcatgacagtccacggggcgacataaatcagttccagcgcatcaccgagcatcgctccccattcagggctggggagttgtgcgccgagatcgagaaagcccagcgcggcgatatcgagaattgccatgctcagtgcgcgggtgatctcggtgaccagcccggcggtgatgtttggcatcacagcaaaccagagaatattcagcgtacttgcgccatccagacgggcggcgataacgtactctttttccagttcgtcatgcaccatgctgtaaatgctacgtaccatacgcggcagcaatgccagccagacagcaaacatagcgtgggacaaactcggtccggcaaacgctacaacgataattgccaacagcaggctagggatcgccagtaaggtatccagaatatggttaagcaccgcactgcggaggccgtgtgtcgccccggcgaaggtgcccagtaccaggccacagatcgtcgcggcaagcgtcaccacaaatgcgccacccacggttggcgcagctccgctcagtaaacggcttaaaacatcgcgtccgaggtcgtcagtccccaggaagaaagaaacttcgccatagcggctccaactcggcggcaataattgataaccgagaaattgctggtcgatgccgtaaggcgcaaaccagccgccaaaaatacacagtacagccagccccgcgcagccgtacaggccgaccatcgcagaggcgtcactataaaatttgcgccaggcggtacgcagcgtgcccggcgggcgcttttcgctgtatacgctatcgtaaggcataccattccttatgtttcagattatttatcgtaaggcataccattccttatgtttcagagggttagccatggcacccaaaatatcagaaatcacgttaacaataatgaccagactgccacacaccatcactccggcggaaatggctgcgtaatcctgctggcggatggcgttaattaaccagcgccctaaacccggccagctaaaaaccatttcggtgatcatcgccagcgtcagcatggtggaaaactgtaagcccaggcgaggaataaccggcggtaacgcgttatgcagaacgtggcgacgcaaaatagtaaagcggctcaaaccgcgggtcgccgccgcttttacatagttctggtcatacacttcgatagtgctgatacgcatcaggcggatcacttcagttgttggcgcaacgctcagggtgatcacgggcaatatcatatggcggattgcgctcatgatcatttcatcccgccatggactgtcgctaagccaggcatcaatcaacgcaaaaccggtaatcggtttcacttcgtagagcagatcgaaacgcccactaacgggcaaccaacctagcgtgagactacaaaacagcgtcaacagaagcgccagccagaacaccgggatactaaagcccagtaaggcgatggcgttgatcaagttatcctgccacttatggcgcgtaatcccggcaatcatccccacggggatgccaacaatcagcgcaaaaccgaaggcgaggatgcacagttccatcgtcgccgggaagacctcttttaactgttcggcaatcggttgaccgttaatgctggaaacaccaaaatcccagtggatcaggccgttaaaccagaacacccaggcattccacagactcgcgccttgtaacggcgcatgaggggtgaaatagctcaagctgaagccaacgaaggtcagcaggaacaaggtgacaatcaataacaaaatgcggcgtaaggtgaagataatcatggttttttcacctcatcctgtttctcgcgatacaccccagcaaaggaggcgttaccaaacgggctaagtaccagacctttgatatcgtaccgataggcctgcaaacgcaaactgctcgccagcggcaaaatgggcaattcctgcgccagaatactctgcgcttcgtcataggcttcaatacgcgccgccagctgctggctagagagcgccttacgcaatacgctgtcgaatttcggatcgcaccagtgggcgaggttggtctggctatgaattgccgcgcagctcagtaacggacggaagaaactgtccgggtcgttactgtccgtcgcccaaccggataacgtcagatcatggctcatatccatcaaccgcgcctcctgaaagcgaccttctaccggcacaatcaccacttttacgccaacctgcgccatatccgcctgaatcagttcggcagttttcagtggactggggttccacgcctggctacgtgtgggcacccacagtttcagcgttaaattttccagccccaagctcttcaactgttcgcggcttttcgccggattgtattcagtaattttagcctcgttgtcataggcccagctggcgcgcggtaaaatagaggccgccgtttcagccgtaccataatagatggattgcatcaggcgctggttattaatcgccagtgccagcgcatggcggacagcgggattatttagcggcggtttggcggtgttaaatgccagataggcgacgttcatcccaggacgcagcgttaaacgcaagcgcgggtcgtcacgcaaaatggatagctggctggcagcaggccaggccagaacgtcgcattccccggtcaggagtttgctcagacgtccggtgccgccggagcctaaatccaccactacctgcggcattaacggtttaccgcgccagaagtcatcatgacgttgtaggcgaataaattgcccggcgcggtattcgctcaactgatacggaccggtgccgaccggttgacggtcgagttgctcctggcgatcttctttctctaacttccgggcatattctgcgctcatgacgctagcataatgggttgcgaggtgccacaaaaaagaagcatccggctgggcgagtcggaactcaacggtatgattatccagtttgcggacgcttttcacgttatcggcaaattgcaggctgtcgaagtaggggaagttgctgccgttgacgttatgccacgggttgttgcggtcaaaaattcgctggaaggtaaacaccacatcgtcggcattcattttacgagtgggagtaaaccagtcggttttttgaaacggaacatcgcgacgcaggtggaagcgataggtcgcgccgttgtcgagtacttcccagctttcggcaagttccggcatcaggcgataggtatagggatcgacatccagcagtcgatcataaaactgggcggcaagggtatcgacaattaacccactgctcgctttggatgggttaaaggtgttgacttgcccgctgacgcaatagacaaaaccgctgtcgcggatatcagcatgcgggggagattcaggcgcggcgattgcctgaccactcacaagtccagcaatcaccaaaagagagcttaatacctggcgcataatattaagggattttatgtaaagaggctatcttactaatatttaatgacatttgccattaccgtttgtgttcaggggtcgtaatgagggccgtgtggttggtcgttgaacaggtgacgtcgccatctgttcaacattcgtacccgtgatttctctataactataactcacagaacaacttagcgaggagcagagcggtacgatcgtgagaaacccattaaagcacgctgcagtgcgtgtcattgttagccagatgcggcgtgaacgctttatccggacaacgatactgaccgatcgtctgcaattaaatcattactcattaccccattgattcaaaaactctgcgatctcatcaatgcgtacgggattaatccccgcttcagcagccatttcatgttgggcttcttcgctgatctcttcattgttcatcaaacgggtgagcagtaactggaagtagtgggccagcggtgtgcgttcagcctctgcgacaggctctgcgcattcggtcgcgtactcatcggcaatatcaaaatattttagcgggatatcgtggttcattatttgcccctggggttaatgcgctaagcataagggcggatgatagcactcgtgatccgggtcatacatctttttatagttaatggcgcggcgcgttaccctcaggcaggataatgcgccgcgcatccgactattacgtttcactcaccggcgttctgtcaccatcatacaacggcactttgcgatagcggcggatcagataccataaatatgcgccgcctaagctagcccataccagaccgagtgtcagactcgtactctcgaggttaacccacagcacacccaccgtcagcgcgccaaccagcggcatcagcaaatagtggaagtgatccttccagcttttattcattcctttacgccgccagaaatgattaaacacgctcagattcacgaaggtaaacgccaccagagcaccgaagttaattaacgctgtggcggtaactaaatcgaagaacagcgcgctcaacgcgacaatcccgaccataatgacgttgagtgccggagtccgccattttgggtgcacatagccaaacacgcgctccggaaacacattgtcacgccccatcacatacagcagacggctcacgctggcatgactagccaggccagaggctaacgtgttcacaaacgtggtgcagaggaaaatgctctggaagagcttgccgccgacgtacagcgcaatttcaggcagtgcggcatccggatctttaaagcggctgatatcgggaaagaacagctgcataaagaagctcgccgcgataaagataacgccaccgtagaccgccgtcaggaagatggctttcgggatcacgcgtgcggcgtccggcgtctcttcgctaagcgtggtcaccgcatcgaaaccgaggaaggagaaacagacaatcgtcgccccggtaataatcgggatcaggtgcgcgttctcgctgataaacggctgaagactccagacggtgccaacgccttctcctttatgcagtccctgaactaccaggaagataaacaccaccatgatggagatttgcaccagtacaaacagggtattgaagttagcgaccaggttgacgctcttcagattcgcggcggttaaaatggcgacgaaggttaccacccacacccacggcggcacttccgggaagagggcggagagatagattttcgccaacaagacgttaatcatcggcaaaaagagataatccagcaggctactccagccgaccataaatccgacgtgcgggttaatgctcttttgcgcgtaggtataggcgctaccggcctccggaaactggcgaaccagtttgccgtagctgatagcggtaaacagcacacccgccagcgccagcaaataggacgccggaacgtgaccgtcgctaatgccggagacaataccaaaagtatcaaatacggtcatcggcgtgagataggccagacccatcatcaccacctgccacaatttcagactttttcgcagacgggttttgccgggttgcgcagcaatattcagtggactattaatagccataattgctgcctcccctgcgtaataaggtttgcggtcgtgtcgacctgaaatcaaacctgtttagcaagggaagcaaagggggcggagtccagtcagtagcaggaggggcgcatacgcagcctccctcgccatgcggggatttaatcatcggcatcatctcatttcctcgtcacagtcttaatcgttaacggaagcccgttgccgcccgcgctccataacgcgacatccgggaaatgtctggattaccagcaaatgtcaggcctggctccgctcaggccgatgaaacaaccccgcaaggggtattacgcgtttttcaacatccactcaatttctgtttctgtgatgaggcgctcaaactgcaacagctcatcatttttacaggcgtgatagacatggcagaagcgttcgcctaaatagcggcgcaggtgatcattctcgataaactcacccagggcatcgctctggcgaatcggaaagggtaagccttcctgttccagcccgttgccttcgacttcttcctgcaacggcagctcgttatcaaggccatgcaaaataccggcaaaaatcgctgccatcaccagatatgggttggcatcggcacccgccacgcgatattccacgcggtgattatgacggtcgccgcacggaatacgcagggcgacggtgcggttgttatggccccagctcgcctgcgtcggcacatacattcccggctggaagcggcgatagctgttcacgtttggtgccagcaacgccatgctgctcggcatcaggtcaatcatcccggcgagcatctttttcagcagcgggctatcttcgccttccgcgtcagaaagcacgttctcgccacgattattttgcatactgatatggatatgcattccgctgcccgcgtgctcttcatacggcttcgccataaaagtggcgtgcatcttatgcttttctgccatcagacgcaccaggcgttttagtgccagcgcatcatcgcaggcttccagcacgttatcagtatggtaaaggttgatttcaaactgacccgggctggcctcagcgaccgcgccatctgccggaatcagctgtaactgcgccagttcatcaatatcattgagcacgtcggcgaagtggttgaggttatcaacggagtaaacctggctttgtgtattgcggtcatcggtgccaggcgcgcagggcggttgcagatacccttcagcgtcgcgctggcgatccagtaaatagaactccagctctaccgctacgaccgggaacaatccgcgctggcgcagctgctgccacaggcggttaagaacgttccgcggctcaacgtcaaagggagcgccatcttcatcgaccatggtcaggagcatctgaccgataaactctggatcggcggcagaaggagttaaggaaccgagaacaggaacacaggtacgatccggctcgcccatttcctgacccagacctgcttcttctactacgttgcccagaatatccattgcaaatacgctggccgggaaataacaccctttctcgagcttcttcaggctactaacaggaatacgctttccacggaagcaaccatttaaatcggtaagtaaaacatcaacatattgcgtattcgggtagcgctccaggtagcgtttcacttcctgcgtaaaggcgctaccccgcctctcttcactctgctgaacaaagttctctacttcaacgatattggtttccatgattcttcgcctttggtttgttttccgctcgttatcaaagcgtaaaatataatgaccaccattcgaatctgtatgcaaactaaatgtttgtcaaatgttaaattgagtttgcaaaaatgaaaacccactgctagattgaaaaaatattgaacataaaggtcatttaaagcgcagtaatggcgataatttagtccactttgtgagattgagcatggaaaatataatgaacaatccggttatcggtgtcgtaatgtgcaggaacaggcttaagggtcatgcgacccagactctgcaagaaaagtacctgaatgccatcatccatgcaggcggcttgcctattgcgctaccacatgcgctggcggaaccgagtttacttgaacaacttttgccgaaactcgatggcatttatcttcctggtagtcccagcaatgtgcagccgcacctatatggtgaaaacggcgatgagcctgacgccgatcccgggcgtgatcttctgagcatggcgataattaatgccgcactcgaaaggcgcatccccattttcgccatctgccggggtttacaagaactggtggtggcaaccggtggtagcttgcatcgcaagctgtgcgaacagcctgaattgctggaacatcgggaagatcccgaactgccggtggaacagcaatatgcaccgagccatgaagttcaggttgaagaggggggattactgtctgcgttgttacctgaatgtagcaacttttgggtaaactctctacatggacaaggggcgaaggtcgttagcccacggttgcgtgttgaagctcgcagcccggatggcttagttgaggcggttagcgtcatcaatcatccttttgcgctgggcgtacagtggcacccggaatggaacagtagcgagtacgcgcttagccgtatattgttcgagggctttatcaccgcttgtcagcaccatatcgctgaaaaacagcgactctgaccactacagtttaaggaaatgcaaatatgagtgatgagggactggcgccaggaaaacgcttgagcgaaatccgccagcagcaggggcttagtcaacgtcgtgccgccgaactctccgggctgactcacagtgctatcagtacgatagaacaagataaagtcagccctgccatcagtacgctgcaaaagctgctgaaggtgtatggtctgagtctcagcgaattcttttccgagccggaaaaacctgatgagccgcaggtcgtcattaatcaggacgacttaattgagatgggtagtcagggtgtgagtatgaagctggttcataacggtaacccgaatcgcacgctggcgatgatctttgaaacgtaccagccgggcacaaccactggggaaagaattaagcatcagggtgaggaaataggcactgtactggaaggtgaaattgttctgacgattaatggtcaggattaccacctcgtcgcggggcaaagttatgccattaataccggcatcccgcacagtttcagtaatacgagcgcaggtatttgccgaattatcagcgcccatacgcccaccacgttttaatctttttgttctgtaagccgggtaagcgcaatgcgcccggcaatctatacacaaaatcattcaagttgcatcaaggcggcaagtgagcgaatcccgatgagcttactcaggtaagtgattcgggggagcgaacgcagccaaggcagaggcggcttgaaggatgaagtgtatataaagaatgtcgccagaaataaacgggcatacggcccggggatctctgcgccctgacgttcacaaactgcatatatctgatagacgtgaaacaggagtcataatgaattttcatcatctggcttactggcaggataaagcgttaagtctcgccattgaaaaccgcttatttattaacggtgaatatactgctgcggcggaaaatgaaacctttgaaaccgttgatccggtcacccaggcaccgctggcgaaaattgcccgcggcaagagcgtcgatatcgaccgtgcgatgagcgcagcacgcggcgtatttgaacgcggcgactggagtctctcttctccggctaaacgtaaagcggtactgaataaactcgccgatttaatggaagcccacgccgaagagctggcactgctggaaactctcgacaccggcaaaccgattcgtcacagtctgcgtgatgatattcccggcgcggcgcgcgccattcgctggtacgccgaagcgatcgacaaagtgtatggcgaagtggcgaccaccagtagccatgagctggcgatgatcgtgcgtgaaccggtcggcgtgattgccgccatcgtgccgtggaacttcccgctgttgctgacttgctggaaactcggcccggcgctggcggcgggaaacagcgtgattctaaaaccgtctgaaaaaagtccgctcagtgcgattcgtctcgcggggctggcgaaagaagcaggcttgccggatggtgtgttgaacgtggtgacgggttttggtcatgaagccgggcaggcgctgagccgtcataacgatatcgacgccattgcctttaccggtagtacccgtaccgggaaacagctgctgaaagatgcgggcgacagcaacatgaaacgcgtctggctggaagcgggcggcaaaagcgccaacatcgttttcgctgactgcccggatttgcaacaggcggcaagcgccaccgcagcaggcattttctacaaccagggacaggtgtgcatcgccggaacgcgcctgttgctggaagagagcatcgccgatgaattcttagccctgttaaaacagcaggcgcaaaactggcagccgggccatccacttgatcccgcaaccaccatgggcaccttaatcgactgcgcccacgccgacagcgtccatagctttattcgggaaggcgaaagcaaagggcaactgttgttggatggccgtaacgccgggctggctgccgccatcggcccgaccatctttgtggatgtggacccgaatgcgtccttaagtcgcgaagagattttcggtccggtgctggtggtcacgcgtttcacaagtgaagaacaggcgctacagcttgccaacgacagccagtacggccttggcgcggcggtatggacgcgcgacctctcccgcgcgcaccgcatgagccgacgcctgaaagccggttccgtcttcgtcaataactacaacgacggcgatatgaccgtgccgtttggcggctataagcagagcggcaacggtcgcgacaaatccctgcatgcccttgaaaaattcactgaactgaaaaccatctggataagcctggaggcctgaaatgaccgaacataccagcagttactacgccgccagtgcgaataaatatgcaccattcgacacgctgaatgagagtatcacctgcgacgtttgcgtggttggcggcggctataccgggctctcctccgcgctgcatctggcggaagcgggctttgacgtagtggttctcgaagccagtcgcatcggctttggcgcaagcgggcgcaatggcggacagcttgtgaactcctacagccgcgacatcgacgtgatcgaaaaaagctacggcatggacaccgcccgtatgctcggcagcatgatgttcgaaggtggtgagatcatccgcgaacgtatcaaacgttatcagattgactgcgactaccgccccggcggcctgtttgtggcgatgaatgataaacagctcgccacacttgaagagcagaaagagaactgggaacgctacggcaataaacagctggaattgctggacgccaacgccattcgccgtgaagtagccagcgatcgctataccggtgcgctgctggatcacagcggtgggcatattcatccgctaaaccttgccattggcgaagcggacgccatccgcctcaacggcgggcgcgtgtatgaactttctgccgtgacgcagatccagcacaccacgccagccgttgtgcgaactgccaaaggtcaggtgacggcgaagtatgtgattgtcgccgggaatgcgtatctgggcgataaagtagagccggaactggcgaaacgcagcatgccgtgcggcacgcaggtgatcaccaccgaacggctgagcgaagatttagcccgtagcctgatcccgaaaaactactgtgtggaagactgtaactatctgcttgattactaccgtcttaccgccgacaaccgcctgctgtacggcggcggcgtggtctacggcgcgcgcgacccggatgacgttgagcgccttgtggtgccgaaactgctgaaaaccttcccgcagctgaagggcgtgaaaattgattaccgctggacgggcaacttcctgctgaccctgagccgtatgccgcagtttggtcgcctcgataccaacatctattacatgcagggctacagcggccacggcgtgacctgtactcatctagccggacgtttgattgccgaactgctgcgcggcgacgccgaacgtttcgatgccttcgccaatctgccgcattacccgttccccggcgggcgcacgctgcgtgtgccgtttaccgcgatgggcgcggcgtattacagcctgcgcgatcgtctgggcgtttaatttccgattaaccgtgaagagtcaaaaggtgtgaaacatgagcaacaatgaattccatcagcgtcgtctttctgccactccgcgcggggttggcgtgatgtgtaacttcttcgcccagagcgctgaaaacgccacgctgaaggatgttgagggcaacgagtacatcgatttcgccgcaggcattgcggtgctgaataccggacatcgccaccctgatctggtcgcggcggtggagcagcaactgcaacagtttacccacaccgcgtatcagattgtgccgtatgaaagctacgtcaccctggcggagaaaatcaacgcccttgccccggtgagcgggcaggccaaaaccgcgttcttcaccaccggtgcggaagcggtggaaaacgcggtgaaaattgctcgcgcccataccggacgccctggcgtgattgcgtttagcggcggctttcacggtcgtacgtatatgaccatggcgctgaccggaaaagttgcgccgtacaaaatcggcttcggcccgttccctggtagcgtgtatcacgtaccttatccgagtgatttacacggcattagtacacaggactccctcgacgccatcgaacgcttgtttaaaagtgacatcgaagcgaagcaggtggcggcgattattttcgaaccggtgcagggcgagggcggtttcaacgttgcgccaaaagagctggttgccgctattcgccgcctgtgcgacgagcacggtattgtgatgattgctgatgaagtgcaaagcggctttgcgcgtaccggtaagctgtttgccatggatcattacgccgataagccggatttaatgacgatggcgaaaagcctcgcgggcgggatgccgcttagcggcgtggtcggtaacgcgaatattatggacgcacccgcgccgggcgggcttggcggcacctacgccggtaacccgctggcggtggctgccgcgcacgcggtgctcaacattatcgacaaagaaagtctctgcgaacgcgcgaatcaactgggccagcgtctcaaaaacacgttgattgatgccaaagaaagcgttccggccattgctgcggtacgcggcctggggagcatgattgcggtagagtttaacgatccgcaaacgggcgagccgagtgcggcgattgcacagaaaatccagcaacgcgcgctggcgcaggggctgctcctgctgacctgtggcgcatacggcaacgtgattcgcttcctgtatccgctgaccatcccggatgcgcaattcgatgcggcaatgaaaattttgcaggatgcgctgagcgattaatagcccaacgcaataatgtctgatgcgctgcgcttatcaggcctgcaaacgacgtattgattatgtatgccgaataaagcattcacgccgcatccggcaagttgtattgctcaacttcgttaaatctggtgctttttcaacaacgcgcggaactgatgataagttaaccccagtaattcagccgcgcgcttctggttatatttcccttgttgcaaactgagttgcagcaactctttttcctgctgcatctgaaactcacgtaaatccagcggcagtgttggaaggctggtggtttcactaacggcgatagcgtcttcaggcggacgccgtttaaagggatcaataatgatgtcatcaagcggataatcgctggtgccgtggcgatacacactacgttccaccacgtttttcaattcacgaatatttcccggccaacgataattcagcaatgtttctctggcgcgctccgtaaaccccgggaacagaggcagcttgatttcccgacacatctggatggcaaagtattctgccatcaacattatgtcgctttcgcgctcgcgcagtggtggcagttgtacaacatcaaaagccagtcggtcgagcaggtcagcgcgaaaagtgccttcattgaccatcgccgggagatcggcattcgtcgcgcataccaaccgcacattcacctgcaatggttggctgccgccaacgcgctccagttcaccgtactcaatcacgcgcaataatttctcctgcaccatcatcggtgccgtagcgagttcatcaagaaatagcgtaccgccgtcggcacgttcaaatctccctggatgacgtttttgcgcaccggtaaacgcccccgcttcgtgaccaaacagttcggaatccagcagattttcatttaacgccgcgcagttaagggaaataaacggcccttgccaacgggaggagagataatgcaggcggctggcaatcagctctttaccggtgccgcgttcgccgatgatgagcaccggtttgtccagcggtgcgagatggctaacctgttccagcacttcgagaaagctgttcgcctcaccaagtaaattatctttgtattctgccatgatgaaattcgccacttgttagtgtaattcgctaactcatcctggcatgttgctgttgattcttcaatcagatctttataaatcaaaaagataaaaaattggcacgcaaattgtattaacagttcagcaggacaatcctgaacgcagaaatcaagaggacaacattatgggtattttttctcgctttgccgacatcgtgaatgccaacatcaacgctctgttagagaaagcggaagatccacagaaactggttcgtctgatgatccaggagatggaagatacactggttgaagtacgttctactagcgcgcgcgcgttggcagaaaagaaacagctgactcgccgtattgaacaagcgagcgcgcgtgaggttgaatggcaggaaaaagccgaactggcgctgctgaaagagagagaggatctggcacgtgcagcgttaattgaaaaacagaaactgaccgatctgattaagtccctggaacatgaagtgacgctggtggacgatacgctggcacgcatgaagaaagagattggcgagctggaaaacaaattgagcgaaacacgcgctcgccagcaggcattgatgttacgtcatcaggcggcaaacagcagccgcgatgtgcgtcgtcagctggacagtggcaaactggatgaagcaatggctcgtttcgaatctttcgaacgtcgtattgaccagatggaagcggaagcagaaagccacagcttcggtaaacaaaaaagcctggacgatcagtttgccgaactgaaagccgatgatgcaatcagcgaacaactggcacaattaaaagccaaaatgaagcaagacaatcaataataacatccaggcggcgtccgaacgcgccgccgctcatcgtctaaggagtacttatgagcgcgctatttctggctattccgttaaccatttttgtgctgtttgttttaccgatctggttatggctgcattacagcaatcgttctggtcgcagtgaattgagccaaagtgagcagcagcgattagcgcaactggctgatgaagcaaaacggatgcgcgaacgtattcaggcgctggaatctattcttgatgcagaacatccgaactggagggatcgctaatggcgggcattaatctcaataaaaaattatggcgtattccacagcagggcatggtccgcggcgtctgcgccgggattgccaactattttgatgtaccggtaaaactggtgcgtatcctggtggtgctgagcattttcttcggtctggcgctgtttaccctggttgcttacatcattttgagttttgcgcttgatccaatgccggacaacatggcctttggtgagcagctaccttccagcagcgaattgctggatgaagtcgaccgtgaactggcggcaagtgaaacgcgtttacgcgagatggaacgttatgtcacttccgatactttcacgttacgtagccgtttccgtcaactgtgaggaaagttatgaatactcgctggcaacaggccgggcaaaaggtaaagcctggtttcaaattagcaggcaagctggtacttcttaccgcactgcgctatggcccggcgggtgtggcgggctgggcgataaaaagtgttgctcgccgaccgctgaaaatgttgctggctgtggcgctggaaccgctgttaagtcgggctgctaataaactggcacagcgttataaaaggtgaggggagtttcgcaaaaattgttaaatctcaggcgtataatggatggcaattttcatccatagaaggacgcttacatgtttaaaaaaggcttacttgctctggcactggtgtttagtctgcccgttttcgccgctgaacactggatcgatgttcgtgttccagagcagtatcagcaagagcacgttcagggggccatcaatattcccctgaaggaagtgaaagagcgcattgccaccgccgttccggataaaaacgacaccgtgaaagtgtattgcaatgccggacgccagagtgggcaagcaaaagagatccttagcgagatgggatatacccacgttgagaacgccggtggcctgaaagacatcgcaatgccgaaggtcaaaggttaaaagaattcaccatgagcggcgcttatgcgccgtttttttttctgtcacaccttatttacatccccatagattatttgcgtcagctcacaaatacgctttttccctggtaaaaaatgatttcctgcgtgactaaaacccttgtgctcaattgacagtttattttctgcggagtagtctctcgtttcatgggaccgctaccacggaaaggcaacatgaaacagaaaattacggattacctggacgaaatctacggtggaacatttaccgcaactcatttacagaaacttgtaacgcgtcttgagagtgcgaaacgattaattacacagcgacgtaaaaaacactgggatgaaagtgatgtcgtgttaattacctatgccgatcaatttcacagcaatgatttaaaaccattacccacatttaatcagttttaccatcaatggctgcaaagcatttttagtcatgttcatttgttgccgttttatccatggagttctgatgatggctttagcgtaattgattatcatcaggtcgccagtgaagcgggggagtggcaggatattcagcaactcggtgaatgcagtcatttaatgtttgattttgtctgcaaccatatgagcgcaaaaagtgaatggtttaaaaactatttacaacagcatccaggttttgaagatttttttattgccgttgacccgcaaaccgatctcagcgccgtcactcgcccgcgtgcgttaccgttattaacgccattccagatgcgcgatcatagtacgcgccatttatggaccacctttagtgacgatcaaattgacctgaattaccgtagccctgaagtgttgctggcgatggtggatgttttactctgttaccttgcgaaaggtgctgagtatgtccgcctggatgccgttggctttatgtggaaagagccgggaacaagctgcatccatctggaaaaaacacatctgattatcaaactgttacggagcattattgataacgttgcgccaggtacagtgatcattaccgagaccaatgttccgcataaagacaacattgcttactttggcgcaggcgatgacgaagcacatatggtgtaccagttcagcctgccgccactggtgctgcatgcggtgcaaaaacagaacgttgaggcgctttgtgcgtgggcgcaaaacctgacactaccttccagcaacaccacctggtttaacttcctcgcctctcacgatggcatcgggctaaacccgctacggggcttgttgcctgaaagcgaaatattagagctggtcgaggcgttacagcaggaaggtgcattagtaaactggaaaaataatcccgacggtacacgcagtccgtatgaaataaatgtgacctatatggatgcgttaagccgccgtgagagtagcgatgaagaacgttgcgccaggtttatccttgcccatgcgattttgttaagtttccccggtgtgccagcgatatatattcaaagtattcttggcagccgtaatgattacgcaggtgtcgaaaaactcggatataaccgtgcgattaaccgtaaaaaatatcacagtaaagagataacccgagaactgaacgatgaagctacattaaggcatgcggtatatcatgagttgagccgtttaattacacttcgtcgcagccataacgagtttcatccggataataattttaccattgatacgattaatagttccgtaatgcgtattccaagaagtaacgctgatggtaattgtctgactggattgtttaatgtcagtaaaaatattcagcatgtaaatattactaatctgcatggtcgggatctgattagtgaagttgatatattgggtaatgaaataacgctgcgcccctggcaggttatgtggattaaataaaaaggaacatctcatgattaaaagtaaaatcgtgctgttaagtgcactggttagttgcgccctgattagtggctgtaaagaagaaaataaaacgaatgtatccatcgaatttatgcattctagcgtggagcaggagcgccaggccgttatcagtaaattgattgcccgttttgaaaaagaaaaccctggcatcaccgttaagcaagtgcccgtggaagaagatgcctataacactaaagtcattactcttagtcgtagcggtagcctgccggaagtgatcgaaaccagccatgactacgccaaagtgatggacaaagagcagcttatcgatcgcaaagcggttgccacagtcatcagcaacgttggtgaaggcgcgttttacgatggcgtactgcgtattgtgcgtaccgaagatggtagcgcatggaccggtgttcctgtcagcgcctggattggcggtatctggtatcgcaaagatgtgctggcaaaagcggggcttgaggagccgaaaaactggcaacagctgctggacgttgcacagaaactgaatgacccggcgaataaaaaatacggcattgcgctgcctacagcagaaagcgtgttgacggaacaatccttctcccagtttgcgttatccaaccaggctaacgtctttaacgccgaaggcaaaatcacccttgatacaccagagatgatgcaggcactgacctattaccgcgaccttactgccaacactatgccgggttctaacgacatcatggaagtgaaagacgcctttatgaacggcaccgcgccgatggcgatttactccacctatatccttccggctgtgattaaagaaggcgacccgaaaaacgtcggtttcgtggtgccaaccgagaaaaactctgcggtctacggcatgttgaccagcctgaccattaccgccgggcaaaagaccgaagagacggaagcagcagaaaaatttgtcacctttatggagcaggcagacaacattgccgactgggtgatgatgagcccaggtgctgcgctgccggtgaataaagcggtggtgactaccgccacctggaaagacaacgacgttattaaggcgctgggtgaactaccgaatcagctaatcggtgaactgccaaatattcaggtttttggcgcagtaggggataaaaactttacccgcatgggtgatgtgacgggttctggcgtggtgagtagtatggtgcataacgtcaccgtgggtaaagccgatctctctactacgctgcaagcgagccagaaaaaactggatgaactgatcgaacagcactaaacccaggacaggaatccgcaatgaacaggctttttagtggtcgttccgatatgccctttgcgctgctgcttctcgcgcccagcttattactgctgggcggtctggtggcgtggccgatggtgagcaatatcgaaatcagttttttacgtctgccgctcaatcccaacatcgagagtacgtttgttggggtgagcaactatgtgcgtatcctctccgatcccggcttctggcatagcctgtggatgacggtctggtataccgcgctggtggtggcgggcagcaccgtgctcgggctggcggtggcgatgtttttcaaccgcgagttccgcctgcgcaaaaccgcgcgtagcctggtgatcctctcctacgtaacgccgtccattagcctggtgttcgcctggaaatacatgttcaacaacggctacggcattgttaactacctcggcgtcgatcttctgcatctctatgagcaggcaccgctgtggttcgataatccgggcagtagctttgtgctggtggtgctgttcgccatctggcgctacttcccgtatgcctttatcagctttctggcgattttgcagaccatcgacaaaagcctgtacgaagcggcagagatggatggcgctaatgcctggcaacggtttcgtatcgtcacgctgcccgcaattatgccggtcctggcgacggtggtgacactgcgcaccatctggatgttctacatgttcgcggatgtttatttgctgacgaccaaggtcgatattctcggtgtatatctctacaaaaccgcctttgcctttaatgatttaggaaaagcggcggcgatcagcgtggtgctcttcatcattattttcgctgtcattctgctgaccaggaaacgggtgaacctcaatggcaacaaataaacgcacactcagtcgcatcggtttttactgcgggctggcgctgtttctcatcatcacgctgtttccattttttgtgatgctgatgaccagcttcaagggcgcgaaagaggcgatcagtctgcatcctacgctgctgccgcagcagtggacgctggagcattacgtcgacatttttaacccgatgattttcccgtttgtcgactacttccgtaacagtctggtggtgtctgtggttagttccgtggtggcggtattcctcggcattcttggggcttacgcgctttcccgcctgcgctttaaaggtcggatgaccatcaacgccagcttttacacggtgtatatgttctctggcattttgctggtggtgccgcttttcaaaatcatcaccgcgcttggcatttacgacactgagatggcgctgatcatcaccatggtgacgcaaactctgcccaccgccgtgtttatgctgaaaagctacttcgacaccatccccgatgagatcgaagaagcggcgatgatggatggcctcaaccgtctgcaaattatcttccgcatcaccgtgccgttggcgatgtccgggctgatatccgtgttcgtctactgctttatggtggcgtggaacgactatctgtttgcgagcattttcctctccagcgccagcaatttcaccttaccggtgggcctgaacgcgctgttcagtacgccagattacatctggggacggatgatggcggccagtctggtgaccgcattgccggtggtgattatgtatgcgcttagcgaacgttttattaagagtggtttgaccgccggtggcgtgaagggctaaagcggccagtttctttacaaggagttttaaatgaaaaagttagtagccacagcaccgcgtgttgctgcgctggttgagtatgaagatcgggcgattttagctaatgaagtgaagatccgcgtgcgtttcggcgcaccgaaacacggaacggaagtggtcgacttccgcgccgccagcccgtttattgatgaagactttaacggcgaatggcagatgttcactccgcgtccggcagatgcgccgcgcggcattgagtttggcaaattccagcttggcaacatggtggttggcgacattatcgagtgcggcagcgacgttaccgactacgcggtgggcgacagcgtatgcggctacggcccgctctccgagacggtcatcattaacgcagtgaataactacaagctgcgcaaaatgccgcaaggcagctcctggaaaaacgccgtctgctacgacccggcgcagtttgccatgagcggcgtgcgcgatgccaacgtgcgcgtaggggattttgtggtggtggtagggcttggcgcaatcggtcaaattgccatccaactggctaaacgcgctggcgcttctgtggtgattggcgtcgatcctatcgcccatcgctgtgatattgcccgtcgccacggcgcggatttctgccttaaccccatcggcactgatgtaggtaaagagatcaaaacgctgaccggcaagcagggtgccgatgtgattatcgaaaccagcggctacgccgacgcgctgcaaagcgcgctccgcggtctggcttatggcggcaccatctcctatgtcgcgtttgccaagccgtttgccgaaggttttaacctcggacgcgaagcgcatttcaataacgccaaaattgtcttctctcgcgcgtgcagcgaaccgaacccggattatccgcgctggagccgcaagcgtattgaagaaacctgttgggaactgctgatgaacggttatctcaattgcgaagatttaatcgacccggtggtgacctttgccaatagcccggaaagctatatgcagtatgtcgaccagcatccggaacagagcatcaaaatgggcgttacgttttaattcaaaggaatgaaaaaaatgaaaatcggcacacagaatcaggcgttctttccggaaaacattctggagaaatttcgttatatcaaagagatgggcttcgatggttttgagattgacggcaaactgctggttaacaacatcgaagaagtcaaagcggcgatcaaagaaaccggtttaccggtgaccaccgcctgcggtggctatgacggatggattggcgactttatcgaagagcgtcgtcttaatggcttaaagcagatcgagcgcattctcgaagcgctggcagaagtgggcggtaaaggcatcgtcgttccggctgcgtggggcatgtttaccttccgcttaccgccgatgaccagcccgcgtagcctggacggcgaccgcaaaatggtgagtgattccctgcgcgtactggaacaggtcgccgcgcgtaccggaaccgtggtgtatctcgaaccgttaaaccgctatcaggatcatatgatcaacaccctcgccgatgcccgccgttacatcgtcgaaaacgatcttaaacatgtacagattatcggcgatttctatcacatgaatatcgaagaagataacctggcgcaggcgctgcatgacaaccgcgacctgctcggtcatgtgcatattgcggataaccatcgctaccagccgggcagcggcaccctggatttccacgcgctgtttgaacagctgcgcgcggataactatcagggctatgtagtgtacgaagggcgtatccgggcggaagatcctgcccaggcgtaccgtgatagcttggcctggttgcgtacctgctaagaggtctttgtgaaaagtgcaatgacaagctctccgctgcgggtcgcgataataggcgcaggccaggtggcggataaggttcatgctagctactactgcacccgcaacgatctggaactggtggctgtctgtgacagccgcctttcccaggcgcaggcgctggcagaaaaatacgggaatgcatccgtgtgggacgatccgcaggccatgctgctggcggtgaaacctgatgtggttagcgtctgcagtcctaaccgttttcattacgaacataccctgatggcactggaagcgggctgccatgtgatgtgcgaaaaaccgcccgccatgacgccagaacaggcgcgggaaatgtgcgataccgcgcgcaaactgggcaaggtgctggcctacgactttcaccatcgttttgcgctcgatacgcaacagctgcgtgaacaggtgaccaacggcgttttgggagagatttacgttaccaccgcccgcgccctgcgtcgctgcggcgttcccggctggggtgtctttaccaataaagaactgcagggtggtggcccgctgatcgacatcggcattcatatgctggatgctgcgatgtatgtgctgggctttccggcggtgaaaagcgtgaatgcgcatagctttcaaaagatcggcacgcaaaagagctgtggtcaatttggtgagtgggatccggcaacttacagcgtcgaagatagcctgtttggcaccattgaatttcataacggcggcattctgtggctggaaacgagttttgcactcaacatccgcgaacagagcattatgaacgtcagcttttgtggtgataaagctggtgcgacgctgtttccagcacatatctacaccgataacaacggtgaattaatgacgctgatgcaacgggaaatagcagacgacaaccgccatttgcgcagcatggaagcctttatcaatcacgtacagggcaagcccgtgatgatagccgacgccgagcaggggtacatcatccagcaactggtggcggcgttgtatcaatccgcagaaacagggacgcgtgtggaattatgaccaggccagtaacgttaagtgaaccccatttcagccagcataccctgaacaagtatgcaagcctgatggcgcaggggaacggctatcttgggcttcgcgccagccatgaagaagattacacgcgccagacgcgagggatgtatctggcggggctgtatcatcgggcgggaaaaggtgaaatcaacgaactggtgaacctgcctgatgtcgtggggatggagattgccataaatggtgaggttttcagcttatcccacgaagcctggcagcgtgagcttgactttgccagtggcgaattacgccgcaatgttgtctggcgtaccagcaacggcagtggttacaccatcgccagccgtcgctttgttagcgcagaccaactgccgctcattgcgctggaaatcactattacgccactggacgccgacgcgagtgtgctgattagtacaggcattgacgccacgcaaaccaatcacggtcgccaacatctcgacgaaacccaggtgcgggtgtttggtcagcatctgatgcaggggagctacaccacccaggatggacgcagtgatgtggccatcagctgttgctgtaaggtgagcggtgatgtgcagcaatgctataccgccaaagagcgccgtttactgcaacataccagtgcgcagcttcatgcaggcgagacaatgacgttgcaaaaactggtgtggatcgactggcgggatgacaggcaagctgctttagacgagtggggcagcgcgagccttcgccagcttgaaatgtgcgcgcagcagagttacgaccaacttcttgcagcaagtacagaaaactggcgtcaatggtggcagaaacgtcgtatcacggtaaatggcggcgaagcgcacgatcagcaagcgttagattatgcgctttatcatctgcgcatcatgacgcctgcccacgacgagcgcagcagcattgcggcaaaaggcttaaccggcgaaggctacaaaggccacgttttctgggatacagaagtatttttgttaccgtttcatctgtttagcgatccgacggttgcccgaagtttactgcgttatcgctggcacaacttgccaggcgcgcaggagaaagcgcgacgcaacggctggcagggcgcgctatttccgtgggaaagcgcgcgcagcggcgaagaagagacgccggaatttgccgccattaacattcgcaccgggctgcggcaaaaagtggccagcgcgcaggcggaacatcatctggtggccgatatcgcctgggcggttattcaatactggcagaccacgggggatgaaagtttcattgcgcatgaaggcatggcgctacttctggagacggcaaagttctggattagccgcgcggtgagagttaacgatcgtctggaaattcatgatgttattgggccagacgaatataccgaacatgtcaataataatgcatacaccagctatatggcccgctacaacgttcaacaggcgctgaatattgcccgccagttcggctgtagcgacgatgcgtttatccatcgcgccgaaatgttcctcaaagagctatggatgccagaaattcagcccgacggcgttttgccgcaggatgatagctttatggctaagccggcgattaatctggcgaaatacaaagcggcggcggggaagcaaaccatactgctggattatagtcgcgcagaagtgaacgagatgcagatcctcaaacaagctgatgtggtgatgctcaattacatgctgccggagcagttcagtgcggcaagctgtcttgccaatctgcaattttatgaaccgcgcactattcacgacagcagtttaagtaaagcaatccacggcattgttgccgcacgctgtggcctgctgacccaaagttatcagttctggcgcgaggggactgaaatcgatcttggtgctgatccgcatagttgtgatgatggtatccatgctgccgcaactggcgctatctggctgggggcgattcagggttttgccggggtgagcgtgcgtgacggtgaattgcatctcaatccggcgttacctgagcagtggcaacagttgtctttccctctgttctggcagggctgcgaattacaggtcactcttgacgcgcagcgtattgcgattcgaacttctgcgcccgttagtctgcgtttgaacggtcagcttataaccgtggctgaagaatctgttttctgtttgggtgattttattttgcccttcaatgggaccgctaccaaacatcaggaggatgaatgaaactgcaaggggtaattttcgatctggatggtgtaatcaccgataccgcgcatctgcatttccaggcgtggcagcagattgccgctgaaattggcatcagcattgatgcgcagtttaacgaatccctaaaagggatcagccgcgatgagtctctgcggcgcattctgcaacacgggggcaaagagggcgactttaacagccaggagagggcgcaactggcgtatcgcaaaaatctgctctatgtccacagtctacgcgagttgacggtcaacgctgttctacccggcattcgctctttgctggcagatctccgtgcacagcagatcagcgttgggctggcttctgtctccctgaatgcgccgacgattttagcggcgctggagctgcgcgagtttttcaccttctgcgcggatgcttcccaacttaaaaacagcaaaccggacccggaaatctttctcgccgcctgtgcagggctgggcgtgccgccgcaggcatgtatcggcattgaagatgcgcaggcgggcattgacgccattaacgccagcggtatgcgcagcgtggggatcggcgcgggcttaaccggggcgcaattactgttgcctagtacggaaagtctcacctggccgcggttaagcgccttctggcaaaacgtataacaaaggaatcaacatggctcagcttagcttacaacatattcaaaaaatctacgataaccaggtgcatgtggtgaaggacttcaacctggaaattgccgataaagagttcatcgtgtttgtcggcccgagcggctgcggtaagagcaccaccctgcgcatgattgccgggcttgaggagatcagcggcggcgatctgttgatcgacggcaaacgaatgaatgacgttccagccaaagcacgcaatatagcgatggtgttccagaactacgcgttgtatccgcatatgacggtttacgacaacatggcgtttggtctgaagatgcaaaaaatcgccaaagaggtgattgatgagcgggtgaactgggcggcgcaaattctcggcctgcgtgagtacctgaaacgtaagccgggggcgctttccggcgggcaacgtcagcgagtggcgcttgggcgggcgattgtacgcgaagcgggcgtgtttttaatggatgaaccgctctctaaccttgatgccaagctgcgcgtgcaaatgcgcgcagagatcagcaagctgcatcagaaactgaacaccaccatgatctacgtgacccacgatcagaccgaagcgatgaccatggcgacgcggattgtgattatgaaagacgggattgttcagcaagtaggtgcgccgaaaaccgtttataaccaacccgcgaatatgtttgtttccggatttattggaagtccagcgatgaattttattcgcggcacgatcgatggcgataaattcgttacggaaacgcttaaattaaccattcccgaagagaaattagcggttctgaaaacacaggaaagtttgcataagcccatcgtgatgggaatacgaccggaagatattcatccggacgcgcaagaggaaaataacatttccgccaaaattagcgtggcagaattaaccggtgcggaatttatgctctacaccacggttgggggcacgagttaaacggttgggggcacgagttagtggtccgtgctggtgcgttaaatgattatcatgcaggagaaaatatcactattcattttgatatgacgaaatgtcatttctttgatgcagaaacggaaatagcaattcgctaaatacagggggaaggcattcccccaggataatacaaggaacaataatgaaaaagttattaccctgtaccgcactggtgatgtgtgcgggaatggcctgcgcacaggccgaggaaaggaacgactggcactttaatatcggcgcgatgtacgaaatagaaaacgtcgagggttatggcgaagatatggatgggctggcggagcctagtgtctattttaatgccgccaacgggccgtggagaattgctctggcctattatcaggaagggccggtagattatagcgcgggtaaacgtggaacgtggtttgatcgcccggagctggaggtgcattatcagttcctcgaaaacgatgatttcagtttcggcctgaccggcggtttccgtaattatggttatcactacgttgatgaaccgggtaaagacacggcgaatatgcagcgctggaaaatcgcgccagactgggatgtgaaactgactgacgatttacgtttcaacggttggttgagcatgtataaatttgccaacgatctgaacactaccggttacgctgatacccgtgtcgaaacggaaacaggtctgcaatataccttcaacgaaacggttgccttgcgagtgaactattatctcgagcgcggcttcaatatggacgacagtcgcaataacggtgagttttccacgcaagaaattcgcgcctatttgccgctgacgctcggcaaccacagcgtgacgccgtatacgcgcattgggctggatcgctggagtaactgggactggcaggatgatattgaacgtgaaggccatgattttaaccgtgtaggtttattttacggttatgatttccagaacggactttccgttagcctggaatacgcgtttgagtggcaggatcacgacgaaggcgacagtgataaattccattatgcaggtgtcggcgtaaattacagcttctgataatgggctaaattgccggatgcggcgcgagtactttatccgatctataaatgtaggccggataagatgcgctagcatcgcatctggcattcaggcaaggtagctggtatttatttcagcgtcatatgcgtggcaacggtaatattctgtggactcggttttccagaaattaagcggaataataactcgcagctttgttgacctaactcctgcgtcggaacatcgatgccgcccggtgcaggcgttaaaataaaactcagcgtttcattgctataacccaccaccgctaactgctgcggaatagcaatatttttctctgctgccgcacgataaatgctcattaatttcaggctgtcagtggcaaacaccgcctcaggcaacggactctggcttaataattgccgtgctgcttttaatgcagtttcatgggtataaccgccatcaacaatccattcatcacgcactgcaatattatgcgcagccaggctctgcttataaccattaacgcgatcaacgctaacatggacatcaagcggagcatgcaggcaggcaatattttgatgcccactttcaattaatgcatcggtcaacgcaatgctgtcgccaaaattatcggtatcgacagaataaacatgggcatattgaccttcaactttgccaatcaccaccaccggaatatcatatttatcgagttgggcaaaaaaactctcatccgctgggctactgagcataataatgcctttaatcattttctgcttaattttgctttcgcatttttgcagatcttctgccggattgtggctcgtttgtaatatcacgtcgaaaccttcttcttcagctttggcggtgatggcatgcaaaacttcagagaaaaacggattacccgccgtagttttggtgctacgggtagaaatcaccataatggcatcaaaaccgctagaggtcagcgcgcgggccagcttgtttggctgatactgtaattcttcaatggcccgtaacactttttcgcgcgcttccggggagatattagtttgcttattcagcacgcgacttacggtggatttacttacgcctgcaaccctggcaatatcataaatagtaggggacataggtcaggaactccgtccgaacgtgaatgctgcacatcttatggagttcgccggtcgatgacaacacgggcagttgataatcaatggcctggcccccacattcatatccttacgaatgattttttttctggtcttcagagcagcacaggacagcaatgaagcgacttaaaaatgaactcaatgcgctggtgaatcggggtgtcgacagacatctgcgcctcgctgtaaccggacttagccgcagcggcaaaacagcgtttatcaccgcgatggttaatcagttgcttaatattcacgccggagcacgtttgccgctgttaagtgcggtgcgtgaagagcgcctgctgggcgtgaaacgcattccccagcgtgactttggcattccgcgcttcacctatgacgaagggctggcgcagttatatggcgatccacccgcctggccaacgccaacgcgcggcgtcagtgaaatccgcctggcgctacgttttaaaagcaatgatagcctgctacgccactttaaggatacctccacgctgtatctggaaattgtggattatcccggcgaatggttgctcgacctgccgatgctggcgcaggactatttaagctggagccgccagatgacgggcttactcaatggtcagcgcggagaatggagcgcgaaatggcgaatgatgagcgaagggctggacccgctagcgcctgccgacgaaaaccggctggcggacattgccgccgcgtggaccgattatctccaccactgtaaagagcaggggctgcactttattcagcctgggcgctttgtcttgccgggagatatggcaggtgcgcccgcgctgcaattcttcccgtggccggatgtcgatacctggggcgagtccaaactggcgcaggccgataagcataccaatgccggaatgctgcgcgagcgctttaattattactgcgagaaggtggtgaaggggttctataagaatcattttctgcgctttgaccgccagattgtgctggtggattgcctgcaacctctcaacagtgggccacaggcatttaatgatatgcgtctggcactgacgcagctgatgcaaagttttcactacgggcagcgtaccctgttccggcgtttgtttagcccggttatcgataagctattgtttgctgccactaaagcggaccatgtgaccatcgatcagcacgctaatatggttagtttactgcaacaactgattcaggatgcctggcaaaatgcggcgttcgaagggatcagcatggactgcctggggctggcgagtgttcaggcgaccaccagcggcattattgatgttaacggtgagaaaatcccggcgctgcgtggtaatcgacttagcgatggcgcaccgctcactgtttatcctggcgaagttcccgcacgtttgcctggtcaggcgttctgggataagcaaggcttccagtttgaggcatttcgtccgcaggtgatggatgtcgacaaaccactaccgcatattcgtcttgatgctgcgctggaatttttaataggagataaattgcgatgaccgaaccgttaaaaccacgtattgatttcgacggtcctctggaggtcgatcagaatcctaaattcagggcgcagcagacctttgacgaaaatcaggcgcaaaattttgccccggccacgctcgacgaagcgcaggaagaagaggggcaagtcgaagcggtaatggacgcagcgttacgtccgaaacgcagcctgtggcgcaaaatggtgatgggagggctggctctgtttggcgcaagcgttgtcgggcagggtgtacagtggacaatgaatgcctggcaaacccaggactgggtggcgctgggtggatgtgccgctggggcattgattatcggcgctggcgtaggttctgtggtaacagagtggcggcgcttatggcgcttgcgacagcgcgcccatgaacgcgacgaagcgcgtgatttattgcatagccacggcacgggcaaaggccgcgcattttgcgaaaaactggcgcagcaggcgggtattgatcagagccatccggcgctgcaacgctggtatgccagtatccatgaaacgcaaaacgaccgtgaagtggtcagcctgtatgcgcatttggtccagccagttttagatgcccaggcgcggcgcgaaatcagccgtagcgcggcggaaagtacgttgatgattgcggtcagcccgctggcgttggtcgatatggcgtttatcgcctggcgcaatctgcgtttaattaatcgcatcgccacgctgtatggcattgaactggggtattacagccgtttgcgtctgtttaagctggtattgctgaatatcgcttttgccggagccagcgaactggtgcgcgaagtggggatggactggatgagccaagatctcgctgctcgtttgtctacccgcgcagctcaggggattggtgcaggacttctgacggcacgactcgggattaaagctatggagctttgccgcccgctgccgtggattgacgatgacaaacctcgcctcggggatttccgtcgtcagcttatcggtcaggtgaaagaaacgctgcaaaaaggcaaaacgcccagcgaaaaataatgcaatatcgggtgctgaccggatatctttacgccgaagtgcccgtttttccgtctttgtgtcaatgattgttgacagaaaccttcctgctatccaaatagtgtcatatcatcatattaattgttcttttttcaggtgaaggttcccatgcgtctggaagtcttttgtgaagaccgactcggtctgacccgcgaattactcgatctactcgtgctaagaggcattgatttacgcggtattgagattgatcccattgggcgaatctacctcaattttgctgaactggagtttgagagtttcagcagtctgatggccgaaatacgccgtattgcgggtgttaccgatgtgcgtactgtcccgtggatgccttccgaacgtgagcatctggcgttgagcgcgttactggaggcgttgcctgaacctgtgctctctgtcgatatgaaaagcaaagtggatatggcgaacccggcgagctgtcagctttttgggcaaaaattggatcgcctgcgcaaccataccgccgcacaattgattaacggctttaattttttacgttggctggaaagcgaaccgcaagatagccataacgagcatgtcgttattaatgggcagaatttcctgatggagattacgcctgtttatcttcaggatgaaaatgatcaacacgtcctgaccggtgcggtggtgatgttgcgaagtacgattcgtatgggccgccagttgcaaaatgtcgccgcccaggacgtcagcgccttcagtcaaattgtcgccgtcagcccgaaaatgaagcatgttgtcgaacaggcgcagaaactggcgatgctaagcgcgccgctgctgattacgggtgacacaggtacaggtaaagatctctttgcctacgcctgccatcaggcaagccccagagcgggcaaaccttacctggcgctgaactgtgcgtctataccggaagatgcggtcgagagtgaactgtttggtcatgctccggaagggaagaaaggattctttgagcaggcgaacggtggtagcgtgctgttggatgaaataggggaaatgagtccacggatgcaggcgaaattactgcgtttccttaatgatggcactttccgtcgggttggcgaagaccatgaggtgcatgtcgatgtgcgggtgatttgcgctacgcagaagaatctggtcgaactggtgcaaaaaggcatgttccgtgaagatctctattatcgtctgaacgtgttgacgctcaatctgccgccgctacgtgactgtccgcaggacatcatgccgttaactgagctgttcgtcgcccgctttgccgacgagcagggcgtgccgcgtccgaaactggccgctgacctgaatactgtacttacgcgttatgcgtggccgggaaatgtgcggcagttaaagaacgctatctatcgcgcactgacacaactggacggttatgagctgcgtccacaggatattttgttgccggattatgacgccgcaacggtagccgtgggcgaagatgcgatggaaggtagcctggacgaaatcaccagccgttttgaacgcagcgtattaacccagctttatcgcaattatcccagcacgcgcaaactggcaaaacgtctcggcgttagtcataccgcgattgccaataagttgcgggaatatggtctgagtcagaagaagaacgaagagtaagcgcgaatatgcctgatggtgcaacaccatcaggcatattaaattatgctttcagtacagccagagctgcttcgtaatccggctcggtggtgatttcatccaccagctggctgaaaatcacattgtcattttcgtcaataaccacaacggcacgcgctgccagacctttcagtgggccatcagcaattgccacaccgtaagcttgcagaaattcagcgttacggaaagtggagagggtgataacgttgttcagaccttctgcgccgcagaaacgagactgggcgaacggcagatcggcagagatacacagcacaacggtgttgtcgatctcagttgccagttggttaaacttacgtacacttgcggcgcaaacaccggtatcaatactcgggaaaatgttcagcactttgcgtttacccgcaaactgaccgagggtgacgtcagacagatcttttgccacgagagtaaaagtctgcgctttgctacccgcctgcgggatggaattggcgactgtaaccgggttgccctggaaatgaacggtttgactcatgattatctttcctgtttacatatagttaacgtcacacctagtttatgctaactgtcaataacacagcaaacgctattacagggtctccttacaacaactgtcaacgcagtttgtaattaaaagattaacccatatctggtgaatgaaacagtgatgaaccttctgccagatcaataaatcagaaaaatttaatgatatgacagaaggatagtgagttatgcggaaaaatcaggcaacgttacgcgtatgaccagcaagctgggccagcgcatcgttattttcgatggtgatgtatttacctttgactgccagcatgccgcttttctggaagcgacccagcagacggctgatggtttctaccgtcaggcccagatagttaccgatatcgccacgagtcatcgtcaggcggaattcacgaggggagaagccgcgttgggcaaaacgacgggacaggttgtagatgaatgcagccagacgttcctcggcatttttcttgctcaacagcaggatcatgtcctgatcgcctttgatttcaccgctcatcagacgcatcatctgctgacgcagattcggcattttaccggacaaatcgtccagcgtttcgaacgggatttcacataccatgctggtttccagcgcctgcgcgaagctcgggtgatggccgctgccgatggcgtcaaatcccaccaggtcgcctgctaaatggaaaccagtgatttgctcgtcgccttgctcagtgatggtataacttttaatcgtaccggagcggatggcataaaggcttttaagttcatcaccagccttaaacagcgtctggcctttctgaataggcttcttccgctcaatgatattatcaagctgatcaagctcatgttcgttgagtgtgaacgggatgcaaagctggctgatgctgcaatcctggcaatggatagcacaaccgccagactgaatgcgccgtataattcgcttttccgggatcataggtctgctcaagccgtaattgatatttgtcaattttaacatctttttagggagcaagtaagtctaagcaaaccttaacagcagagaattccgatattagatgtaaatatatgtctatctatttgaaaacccttaagttgttaagggtaactttacataaaagtgtgaacaagctggcacaaattgtttaatgtttacagcaaaagataaccttcatggcgcaataaccactcttttcgctgaactccgcctgcatatccggtcatggtgccgtttcggccaataacccgatggcaaggtacgacgatgctgatgggattgcttccgtttgccgcaccaacggcacgcgccgcgccaggacggcccaattgctcagccagttggccgtaatgcattacctgcccgcaggggatagtgcgtagtgttttccagacttcgcgctgaaatggcgtcccccccgtagcagtgggaagcgtatcaataatgctaagattaccggcaaaatattcacgaagcttgtcgcttaaaccgcctggattggtggcagaaatgcgctcatagccttctttgcgataatggatgtccagcagctgcaccatgcgttcgctgtactcttcccattcaaccgcccgcaggcgaaattgctcatcgcaaatcacccacagtggacccagtggcgtggcaattttttcttcaagtaatctcagcatccgttctctcttaagacaaacgtgggtaaatacccggacctatcggcagaccgacaagataccacgccagcacatcgcagccatactatgcagaaacaatgctgtcgatggctgcttttgcgtcagactgtgctttcgctgccatttccggaccgtatgcgatcccttcggcgaagacaaatttcacatcggtaatgccgataaagccgaggaacgtggacagatacggcgtcaccaggtccgttggtccatctttgtggatcccgccgcggctggtaataacgatggcttttttacccgttaccagaccttccggaccgttctcggtatagcggaaagtaacgcctgcgcgggcaaccaggtcaaaatagtttttcaactgagtcgagatgttgaagttatacatcggtgccgcaataacgataacgtcgtgggctttcagctcggcaatcaactcatcggaaagtgccagagcttcctgctgacgcggagtcagcggcgcatcgctcggacgcagagcgccaaccagttcgccatccagtaccggaatcggatttgcagccaggtcgcgaacggtgatttcatcagcggagtgcttttcgcgccattgttcaacaaaataatcggacaactgattagactgagagtaccctgccaggatgctggatttaagaactaataccttgctcatggtgtttccttatagatgtttgaatgggcgatgccccgttgcttgttgacactttattcacaatcctgccacagagatagcgcaataaatcgaagcctatgttcgaatttattgaacaacgcatagaaagccgcgatgtggtactctatatctatcatttaaaagaaaattaatcaggcagactactgcccactaacgttatgacagaacaacaaaaattgacctttacggccttgcagcagcggctggattcgctgatgctgcgtgacagactgcgtttttctcgccgtctgcacggcgtgaagaaggttaaaaatcctgatgcacaacaggccattttccaggagatggcgaaagagattgaccaggcggcagggaaagtcctgctgcgtgaagcggcacgaccggaaattacttatcctgacaatttaccggttagtcagaaaaaacaggacattctcgaagcgattcgtgatcaccaggtggtgatcgtcgccggggaaacgggttctggtaaaacgactcagttaccgaaaatctgtatggagctggggcgcgggattaaaggactgatcggccatacccagccgcgtcgtctggcggcaagaacagtggcgaaccgtattgcggaagagctgaaaacggagccgggcggttgcatcggttacaaagtgcgtttcagcgatcacgtaagtgataacacgatggtcaagctgatgaccgacggtatcctgctggcggagatccagcaagaccgcctgctgatgcagtacgacactatcattattgacgaagcgcacgaacgcagcctgaatatcgattttttgctcggctatttgaaagagttgctgccgcggcgtcctgacctaaaaatcattatcacttccgcgactatcgacccggaacgctttagccgccactttaataatgcgccgattattgaagtctccggtcggacctatccggtggaagtgcgctatcgcccgattgttgaagaagccgatgacaccgagcgcgatcagttgcaggcgatttttgacgccgtagacgaactgagtcaggaaagccatggcgacattctgatctttatgagcggcgagcgggaaatccgcgataccgccgatgcgctgaacaagctgaacttacgccataccgaaatcttgccgctttatgcgcggcttagcaacagcgaacaaaatagggtattccagagccacagcggacggcgcattgtgctggcgaccaacgtcgcggaaacgagcctgaccgtaccggggattaaatacgttatcgaccccggtacagcgcgtatcagccgctacagctatcgcaccaaagtgcagcgtttgccgattgagccgatttcccaggcgtctgccaatcagcgtaaaggccgctgtggtcgtgtgtccgaagggatctgtattcgtctctattccgaagacgatttcctcagccgcccggagtttaccgatccggagattctgcgtaccaacctggccagcgttattttgcagatgaccgcgctggggctgggcgatatcgctgcgttcccgtttgtcgaagcaccggataaacgcaatatccaggatggcgtgcgtctgctcgaagagctgggcgcgatcaccactgatgaacaggccagcgcctataaactgacgccgctcggtcgccagctcagccagttgcctgtcgacccacgtctggcgcgtatggtgctggaagcgcaaaaacatggctgcgtgcgtgaggcgatgattatcacgtccgcgctctccattcaggatccgcgcgaacgtccgatggacaaacagcaggcaagcgacgaaaaacatcgtcgcttccacgacaaagagtctgactttctcgcgtttgtgaatctgtggaattatcttggcgagcagcaaaaggcgctttcttccaacgccttccgtcgcctgtgtcgtaccgattatctcaactatctgcgcgtgcgcgaatggcaggatatctacacccagttgcgtcaggtggtgaaagaacttggcattccggttaacagcgaaccggcggagtatcgcgaaattcacattgcgttgctgaccggtttactttcccatatcggcatgaaagatgccgataaacaagaatataccggcgcacgtaacgcgcgtttctccatcttccccggttctggtttattcaaaaaaccgcctaaatgggtaatggtggcggaactggtagaaaccagccgcctgtgggggcgcattgctgcgcgtatcgacccggaatgggtggagccagttgctcagcatttgattaaacgcacctacagcgaaccgcactgggaacgggcgcagggcgcggtgatggcaacggaaaaagtcactgtttatggtttgccgattgttgccgcgcgcaaggtcaactacagccagatcgatccggcgttatgtcgtgaactctttattcgccacgcgctggtggaaggtgactggcagacgcgtcacgcattcttccgtgaaaacctgaaactacgggcggaagtagaagagctggaacacaaaagtcgtcgccgcgatattctggttgatgacgaaacgttgtttgagttctacgaccagcgcatcagccacgatgtaatctccgctcgccacttcgacagctggtggaaaaaagtcagccgcgaaacgcctgatttgctcaactttgaaaaaagcatgttgatcaaagagggcgcagaaaaaatcagcaagctggattacccgaacttctggcatcagggcaatctcaagctgcgtttgagctatcagtttgagcccggcgcggatgctgacggtgtgaccgtacatattccgctgccgttacttaaccaggttgaggaaagcgggtttgaatggcagatccccggtctgcgccgcgaactggtgattgctctgattaaaagcttgccgaaaccggtacgccgtaattttgtacccgcgccaaactatgccgaagcgtttttaggccgcgtcaaaccgctggagttaccgttgctcgacagccttgagcgcgagttacggcggatgaccggcgttaccgttgaccgcgaagactggcactgggatcaggtgcccgatcacctgaaaattaccttccgcgtggtggatgacaaaaacaagaagctaaaagaagggcgcagcctacaagatctgaaagatgcgctgaaaggcaaagtgcaggaaacgctatctgcggtggcggatgacggtatcgagcagagcggcttacatatctggagttttggtcagctgccggaaagctacgaacagaagcgtggcaactacaaagtgaaggcgtggccggcgctggtggatgagcgcgacagtgtggcgatcaaactgtttgataacccgctggagcaaaagcaggcaatgtggaacggtcttcgccgtctactgctgctgaatattccaagcccaatcaaatatttacatgaaaagttaccgaacaaagccaagctgggactgtactttaacccgtatggcaaagtgctggagctgatcgacgactgtatctcctgcggtgtggataaattgatcgacgccaatggtggcccggtctggacggaagaaggctttgctgcgctgcatgaaaaagtgcgtgccgaactgaacgacacggtggtggatattgcgaagcaggtcgagcaaatccttacggcagtgttcaatatcaacaaacgtctgaaagggcgggtggatatgaccatggcgctggggctttctgacattaaagcgcagatgggcgggttggtatatcgcggttttgtcactggtaacggcttcaaacggctgggcgacacgctgcgatatttgcaggcgattgaaaaacggctggaaaaactggcggttgatccacatcgcgaccgtgcgcagatgctgaaagtcgaaaacgtccagcaggcgtggcagcaatggatcaacaaactgccgcccgcacgtcgtgaggatgaagacgtgaaagagatccgttggatgatagaagagttgcgcgttagttacttcgctcaacaacttggtacgccttatccgattagtgataagcgtattttgcaggcgatggagcagattagcggttaaccctgctatttgcctgataaagaaaaaacccggtaagcatttagcgccgggttttttattaattctaaaacggtaagggtaaaaattcaggaattcagaaaaatacaattctctgctgcaagatgaataatgtttatctacagcatttccttaaaagatatgtcaggcttgcggagtggcggttaaggacatacgatttcctcctttcagagtgctccgcttctcactattatctcacgcagtattcttaagggaacgataaggaggaaccatgaacattaccccgtttccgacgcttagcccggcaactatagatgccataaatgttatcggacagtggctggcgcaggatgatttctccggtgaggtgccgtatcaggccgattgcgtgatccttgcaggcaatgcggttatgccgactatcgatgcggcatgtaagattgcccgcgatcagcaaattcctttactgattagtggtggtatcggtcacagcacaacttttttgtatagcgccatcgcacagcatccgcactacaacactatccgcaccactggcagagcagaagcgaccatcctggcggatatcgctcatcagttctggcacattccgcatgaaaaaatctggattgaagaccagagtacaaactgcggtgaaaacgcacgctttagcatcgcgctattgaatcaggccgtagaacgagttcatacggctatcgttgttcaggaccccaccatgcagcggcgcacgatggcgacgttccgccgtatgactggggacaatcccgatgcaccacgctggttaagttatcccggattcgttcctcagttaggaaataacgcagacagtgtaatctttattaatcagttacaaggattatggccagttgagcgttatctcagtctactcactggcgagctgccgcgtttacgcgatgatagcgatggctacggtccccgcgggcgagattttatcgttcacgttgattttccggcagaagtcatccatgcatggcaaacgctgaaacatgatgcggtgctcatcgaggcgatggaaagtcgcagcttacgttaaaaattgcccgtttgtgaaccacttgtttgcaaacgggcatgactcctgacttttatttctgccttttattccttttacacttgtttttatgaagcccttcacagaattgtcctttcacgattccgtctctctgatgattgatgttaattaacaatgtattcaccgaaaacaaacatataaatcacaggagtcgcccatgagtgtacccgttcaacatcctatgtatatcgatggacagtttgttacctggcgtggagacgcatggattgatgtggtaaaccctgctacagaggctgtcatttcccgcatacccgatggtcaggccgaggatgcccgtaaggcaatcgatgcagcagaacgtgcacaaccagaatgggaagcgttgcctgctattgaacgcgccagttggttgcgcaaaatctccgccgggatccgcgaacgcgccagtgaaatcagtgcgctgattgttgaagaagggggcaagatccagcagctggctgaagtcgaagtggcttttactgccgactatatcgattacatggcggagtgggcacggcgttacgagggcgagattattcaaagcgatcgtccaggagaaaatattcttttgtttaaacgtgcgcttggtgtgactaccggcattctgccgtggaacttcccgttcttcctcattgcccgcaaaatggctcccgctcttttgaccggtaataccatcgtcattaaacctagtgaatttacgccaaacaatgcgattgcattcgccaaaatcgtcgatgaaataggccttccgcgcggcgtgtttaaccttgtactggggcgtggtgaaaccgttgggcaagaactggcgggtaacccaaaggtcgcaatggtcagtatgacaggcagcgtctctgcaggtgagaagatcatggcgactgcggcgaaaaacatcaccaaagtgtgtctggaattggggggtaaagcaccagctatcgtaatggacgatgccgatcttgaactggcagtcaaagccatcgttgatagtcgcgtcattaatagtgggcaagtgtgtaactgtgcagaacgtgtttatgtacagaaaggcatttatgatcagttcgtcaatcggctgggtgaagcgatgcaggcggttcaatttggtaaccccgctgaacgcaacgacattgcgatggggccgttgattaacgccgcggcgctggaaagggtcgagcaaaaagtggcgcgcgcagtagaagaaggggcgagagtggcgttcggtggcaaagcggtagaggggaaaggatattattatccgccgacattgctgctggatgttcgccaggaaatgagcattatgcatgaggaaacctttggcccggtgctgccagttgtcgcatttgacacgctggaagatgctatcagtatggctaatgacagtgattacggcctgaccagtagtatctatacccaaaatctgaacgtcgcgatgaaagccattaaagggctgaagtttggtgaaacttacatcaaccgtgaaaacttcgaagctatgcaaggcttccacgccggatggcgtaaatccggtattggcggcgcagatggtaaacatggcttgcatgaatatctgcagacccaggtggtttatttacagtcttaatgagtgaaagaggcggaggttttttcctccgcctgtgcgcgtcagagtttagcgaatttttcgagggtgcgaataagctgtgtgacgaagccatattcgttatcgtaccaggcgaccgttttcaccagttgtaaatcgcccacggcggtaatttccgtttgcgtggcatcaaacaccgaaccgaaatggctgccaatgatatcggaagagactatttcttcatcggtataaccaaatgactcgttattggtggttgcttgtttaagtgcgttattcacctcttcggcagtcacttttttccgagaatcgataccagttcagtgaccgaacctgttttcaccggcacgcgttgcgcatgacctttcagtttgccgctcagttccgggatcaccagaccaatggcttttgccgcccccgtagtgtggggaatgatattttctgccgctgcgcgtgaagcacgtaaatctttaccacgcgggccatccaccagtgactgggtgccagtataggcatgaatggtcgtcatcgtgccgacttctatcccgaaactgtcatgcaaggctttggccatcggcgcaagacagttagtggtgcatgacgccacggaaacaatggtgtcgttgccatccagagtgtcgtcattgacgttataaacgatagttttcatttcaccggcaggggcggaaatcaacaccttcttcgcaccagcatcaagatgcgcctgcgatttctcggcggaggtataaaagccagtacattcgacaatgatttctgcacctttcgctttccacggaatatttttagcctctttttcggcgtaaaccgcgatacttttcccatcaacgataagtgaatcttccgtaaaatcaacgctccaggggaatggtccgtagtttgaatcatgtttcagcaggtaggcgagaatttatggggaagtgagatcattaatagcgacaacgtctatgttgcttttgacttcaagtaatcgacccaacaccagtcgaccgatacgaccaaaaccgttaataccaactttactcatggttttctcctgtcaggaacgttcggatgaaaattgatcctttccaagcttagaccaggatggcgggatgggcaatctccattctcacagtgaaacgtaacgtactgaaaacgggtgaacaatatttaatgaaattttgagaaaagcccgttatgttaacggaaaattatgttaaagcaggaaatgttatggaaaataaatatagtaggttacaaatcagcattcactggctggtctttttactggttatcgcagcgtattgcgcaatggagtttcgtggtttcttcccacgtagcgatcggccactcatcaacatgattcatgtttcctgtggcatcagtattctcgtgctgatggtcgttcgtcttttgttaaggctgaaatacccaaccccgccgattatacctaagccaaaaccgatgatgacgggactggcgcatttgggacatttggtgatttatctcctgtttattgcgctgccagtgattggtttggtgatgatgtataaccggggcaacccgtggtttgcgtttggtttgacgatgccttacgctagtgaggccaatttcgaacgggtagatagcttaaagagctggcatgaaacgctggcgaatctgggatattttgtcatcgggttgcacgctgcggctgcactggcacaccactatttctggaaggacaacacacttctacgcatgatgccgcgtaaacgttcctgaaggatatttaaagaaaacgcctgtactaaaaccgacccgtggtacaggcgaagaatacgggtctacatcggaagcgcctattatatttatttgtatgataaataaaaccataatccttgcccatacgtccatctggcttatttttaatcaattcacccgatctttgatctcatcaacggtatcaaaataaaccagcgtataacgttcaaatcgaacataagattcgataaaccatggaggttatatgaaaaaactggcacttattttgtttatgggaacgcttgtttccttttatgccgatgccgggcgcaaaccctgttctggtagcaaaggggggatcagtcactgtacggcaggcggcaaatttgtctgtaatgatggttctattagtgcaagcaaaaaaacatgcactaactgaagtgtaaaaggggtgccatgagaaaatgaatctgctagtcaaatgcgcggggaaaatccccgcgcttgcccttacctggacgtgcaggccatgagcgcagcaacctccttatcaccgtcccggaaccgcagttcgtagagcgtttgtcgggtcaggagtgtgaatgtcagaatcgtaatgcagataatgagcagacacaccaccagagggttgtgcttcatagcctttctccttgccggatggcgggtaagaggctaagatctgaattgctaggttcattcgttggcctcggttgatagaaatatcggtcggggccttcgtctttctgattcccggttagcctgaaaacagaaagtctcaggcacccgcaggcatcctatgaggtttccttagggacgaaaataatcacttcacgaaattgcgtgctgttttccagaatttttcgtcattcgggttagccagtttagccattcgttactctcttcattccaatagcattaattttctatgcaataattgttgtaaaaatgtgacgcaaagaggtttttggtcataagtaattaccgtcaagtgccgatgactttctatcaggagtaaacctggacgagagacaacggtaatgaatacaactcccagtcagcgattaggttttttgcatcacatcaggttggttccgttatttgcctgcattctaggcggtatcttagttctattcgcattaagtagtgccctggctggctatttcctctggcaggccgatcgcgatcagcgtgatgttactgcggagattgagattcggaccgggttagcgaacagtagtgattttttgcgtagtgcccggatcaatatgattcaggccggggctgcgagtcgtattgcggaaatggaagcaatgaagcgaaatattgcgcaagccgaaagcgagattaaacagagccagcaaggttatcgtgcttatcagaatcgaccggtgaaaacacctgctgatgaagccctcgacactgaattaaatcaacgctttcaggcttatatcacgggtatgcaacctatgttgaaatatgccaaaaatggcatgtttgaagcgattatcaatcatgaaagtgagcagatccgaccgctggataatgcttataccgatattttgaacaaagccgttaagatacgtagcaccagagccaaccaactggcggaactggcccatcagcgcacccgcctgggtgggatgttcatgattggcgcgtttgtgcttgccctggtcatgacgctgataacatttatggtgctacgtcggatcgtcattcgtccactgcaacatgccgcacaacggattgaaaaaatcgccagtggcgatctgacgatgaatgatgaaccggcgggtcgtaatgaaatcggtcgcttaagtcgtcatttacagcaaatgcagcatagtctggggatgacagtagggactgttcgacagggcgcggaagagatttatcgtggcaccagcgaaattagtgctggcaatgcggacctgagttctcgcaccgaagaacaagcggcggctatcgaacaaactgccgccagcatggagcaactcactgcgacggtgaaacagaatgcggataacgcgcatcatgccagcaaactggcgcaagaggcttctattaaagccagcgatggcgggcagacggtttccggtgtagtaaaaacgatgggcgctatctccacgagtagcaagaaaatttctgagatcaccgccgtcatcaacagtattgctttccagacgaatattctggcactgaatgctgccgttgaagccgcgcgagcgggtgagcaagggcgtggatttgccgttgtcgccagcgaagtacggacactcgcaagtcgcagcgctcaggcggcgaaagagattgaaggcttgatcagtgaaagtgtcaggttaattgacctggggagcgatgaggtggcaacggccgggaaaaccatgagcactattgttgatgccgtcgcgagtgtcacacatatcatgcaggaaatcgccgccgccagcgatgaacaaagtagaggcataacgcaggttagccaggcgatttctgaaatggataaggtgacgcaacagaatgcttctctggtagaagaggccagtgcggcggcggtgtcccttgaagaacaggcggcacgattaactgaggcggtggatgtattccgtctgcacaaacattctgtgagcgcagaacctcgcggagcgggtgaaccagttagtttcgctacggtgtgaaaatgttcaaggagggatcgacagatcccttcacctttcagaacggcatactttttcgaatagcgttaatcatcaactggcaaccagaagagaacgtcgcatctacgcgggtcagtattccaatcggttcgcctgcaccatgtcccggaacaggcagggccaccagcgtggcatgacgcaggtcgtcttttacagcgccagaagggacaaaccacacgtaatcgtattcaaccgtaagttgacgagataggctagcagacagcgtttcgatacaaccgctaggaattttacagccctggctctgcactaatgcatcactatgctggcgtggcgcagtgccttctggacttacaacgaccggccattccagcacccggcttagcgttacgttctcctgaagtagcgggtgattagggcggacaaccagcttcaagctttcaagaaacagcagttcgtaattaagcccggtcatcagttcaggatcactcatccgaccaatgccgatatcgatttccccggtttttaaacccgccagaatcatagggttactcattgtcgcaacttgcaaggtcgtctctttttgttgctgatgaaactgacctataacgctaggtaatatccccagtgccgcagtaggtagtgcaccaaccctgacgacatcattattaagaccttctttacgatgaaggctccgtccggcagtgttgatggcgtcaagaactctgactgcatgcgttaaaaattgttcgccgggtaaggtaagttgcgccccctgacgaccacgctcaaacaagcgagcgccagtcagctgctccagttcattcaatgtcttagagagcgcaggttgactcaaattaagggtttcagccgcgcgccccaaagttccttgttgtgcgacagctacgaatgtatgaaggtggcgcaaacggatgcgctgactaaacagactatttttttccataagcgatgttaaaaacgaagcggtgtcgctgacaagtgaagttgtttgattatgataacttgattgcaaaatattattaacaattaaagcaattatgttacagcaaaatggataatattgatgttttcgcggcgagatcacagtttgtaaattcttcccgcaagagtgaatgcggttacctacactccagattactgaccactggaggcagacactatggcgaacagcatcacggcggatgagattcgggaacagtttagccaggcaatgagtgccatgtaccagcaagaagttccgcaatatggcacgctgctggaactggtagctgatgtgaatctggctgtgctggaaaacaatcctcaactgcacgaaaaaatggtaaatgcagacgagctggcgcgactgaatgttgaacgtcatggggcgattcgcgttgggactgcacaagagcttgctactcttcggcggatgtttgccattatggggatgtacccggtgagctattacgatctcagccaggcaggggtgccggtacatagcacagcatttcggcccattgatgatgcttctctggcgcgtaatcccttccgcgtttttacctccttactccgccttgagcttatcgagaacgaaattttgcgccagaaagcggcggagattctgcgtcagcgcgatatcttcaccccacgttgtcgacaactgttagaggaatatgagcagcagggcggctttaacgaaacacaggcacaggagtttgtgcaggaagccctggaaacgtttcgctggcaccagagtgcaacggtagatgaagaaacctatcgcgcattgcacaacgaacatcggttgattgctgatgtggtctgttttcctggatgccatatcaaccacctgacgccacgtacgctggatattgaccgggtgcagagcatgatgcctgaatgcggaattgaacccaaaattctcatcgaggggccgccgcgccgcgaggtaccgattttactacgccagaccagctttaaagcactggaagagacggtgttgtttgcggggcagaaacagggcacgcataccgcgcgctttggtgaaattgagcagcgtggcgtggcattaacgccgaaagggcgacaactgtatgatgatcttctgcgtaacgctggaaccgggcaggataatctcactcaccaaatgcatttacaggaaaccttccgcacttttcctgacagtgagtttttaatgcgtcagcaagggttggcatggttccggtaccgtctgacgcctagcggtgaggcgcatcgtcaggcgattcatcctggagacgatccacagcccttaattgaacgtggttgggtagtggcgcaacccatcacctatgaagatttcttgcccgttagcgcggcggggatcttccagagtaatctgggtaatgaaacgcagacacgcagtcacggtaatgccagtcgcgaagcatttgagcaggcgttgggttgtccggttttggatgagttccagctttaccaggaagcggaagaacgcagtaaacgtcgctgtggtttgctttaaaatctgaccatccgcctttgcaaaaatttgcctgattttacaaacgaatcaggctcatcccatcgacataaaaaaaatgccgatttatgcatattctctcagttcaacaattggattattaataaatattgtctagagtgagcggtcataaataagcactttcttgccgctgaaaacgaccagcgcgggaccattcacaacaccagaaggactcactttcaggtatggatcgtagacgatttattaaaggttcaatggctatggccgccgtgtgcggtaccagcggcattgcttctcttttttctcaggcggcattcgcggcagattctgatattgccgacgggcaaacccagcgttttgacttctccattctacagagtatggcgcacgacttagcgcaaacagcgtggcgtggtgcgcctcgtccgttacctgacacgctggcgacaatgacgccgcaggcttataacagtattcaatacgacgccgaaaaaagcctctggcataacgttgagaaccgtcaactggacgctcagttcttccatatgggaatgggattccgtcgccgcgttcgtatgttttctgtagatccagcaacacatctggcgcgtgaaattcactttcgcccggagttgttcaaatacaacgatgcaggtgttgatacaaaacaattagaagggcaaagcgatctcggctttgccggttttcgcgtgtttaaagcccccgaactggcgcgccgtgatgtagtaagttttctcggcgcgagttatttccgcgccgttgatgatacatatcaatacggtttgagcgcccgcggcctggcgatcgacacttacaccgacagtaaagaagagttccccgactttaccgccttctggtttgatacggtaaaaccgggggcaactacctttaccgtttatgcgttgctcgatagcgccagcattactggtgcctataagttcactatccattgtgagaaaagtcaggtgattatggatgtggaaaatcacctgtatgcgcgcaaagacattaaacagctgggcattgcgccgatgaccagtatgttcagctgcggtactaatgaacgtcggatgtgcgatacaattcatccgcaaattcatgactctgatcgtctgtccatgtggcggggcaacggcgagtggatttgccgtccgctgaataatccgcaaaaattgcagttcaatgcttacaccgacaacaacccgaaagggtttggtttattgcaactggatcgtgacttctcccattatcaggacattatgggctggtataacaaacgcccaagtctgtgggtggaaccgcgtaacaagtggggtaagggcaccatcggcctgatggaaatcccaacaacgggcgaaacgctggataacattgtctgcttctggcagccagaaaaagctgtaaaagcaggtgatgagtttgcattccagtatcgtctgtactggagtgcgcaaccgcctgttcattgcccattagcgcgcgttatggcgacgcgtaccggcatgggcggtttcagcgaaggttgggcgccaggtgaacactatcccgaaaaatgggcgcgtcgttttgccgtcgatttcgttggtggtgatctgaaagctgccgcgccaaaaggcattgagccggtgattacgctttccagtggggaagcgaagcaaatcgaaattctctatattgaacccatcgatggttatcgtattcagtttgactggtatccgactagcgactccactgatccggtcgatatgcggatgtatctacgttgtcagggggacgctatcagtgaaacatggctgtatcagtatttcccgccagcgccggataaacgtcagtatgttgacgaccgcgtgatgagttaatcgttttttcttcggcaccttcttcgggaggtgccgtctggttaaacacgatcccgctcgcatttttccctaagttaaatgagtaatctgatggtgtgtatttcagatacaccttgtcagccactaacagggagtgcgtatgtttccagaataccgagatttaatatcccgtctgaaaaacgaaaatcctcgctttatgtccttgttcgataaacacaataaacttgatcatgaaattgccagaaaggaaggttccgacggtcgagggtacaatgcggaagtggtccgcatgaaaaaacaaaagctacagttaaaagatgagatgctcaaaatcctgcagcaggagagcgtcaaagaggtgtaaactttcctaagccgccagccaggcggcttttttaacaactgcatggattgactggagataagatgactgaaacgataaaagtaagcgaaagtcttgaattacatgctgttgcagaaaatcacgtcaaacctctttatcagttaatctgtaaaaataaaacctggttacagcagagcctaaactggccgcagtttgttcaaagtgaagaggacacgcgaaaaacggtgcagggtaatgtgatgttgcatcaacgcggctatgccaaaatgttcatgattttcaaagaagatgaacttatcggcgttatcagctttaatcgtattgaaccactgaataaaaccgctgaaatgggctactggctggacgaatctcatcaggggcaggggatcatttctcaggcgctgcaggcattgattcatcattacgcccagtctggtgaacttagacgcttcgtgatcaaatgtcgggtggacaatccgcaaagcaaccaggtcgctttgcgcaatggttttatccttgaaggttgcctgaaacaggctgagttcctgaatgatgcctatgatgatgtgaacttatacgcgcgtattatcgatagtcaataatcacaataaccctgccagcggcgttcgcgtaatgcgctcctcgccgttaatgacttttggaccacggacatgaaccgtgtcgccatcaaaggcttcaacgacggcgtggtcggttaactccacatggttttcaattatcaccgcacctgtaatacggctctcaccttgtatgacaacgtgctcgtcgagcagaatcggtccgccacgtaccacggcatttccgccaaccaagacatgatgttttaacacacaattaccttccacaatggcatattccgccacctggctactgtaatgaatcgtcggaatggcatcttcttctatgccagctttcacctgcgcgtgaccgtagactttagcgcaatcgcatagccagacattgttctcttcattaccttcaatactggcaaaatcaaaaacttcggcgcgatgttcaataaaagcataccggacgacggcatcgccataaatttgtgcctggtggacaatacggctggcgctaacccttgcgcgatcataaatttggagcaggagttgatggtcgggcgttaagccttgtgcggcgacgatcatagaatgttgatcaattaaggcgtgaccaaatattctacattgcccgtaaactaaactgtcatgaatggtgacgctgtcacttatatatgcaccctggctgatttcactattatcgatccagacgttatccgttgcgtaaacctctccccacagcacgctggtgccggtgatacgcgtattaccggaaatcaccgctccgccgaacgcaatagcattctggtcgtaaatccagcaatttccttcttgtgctaacaccgtttcgcgatcgatccagccgccagcggttcctgctatcacatcgttaaaatcgctaatggcgataatctgccgtaataacacattttttttagtgccatcttcctgataactaaaggctcgctgttcttcacttagacgatatttgcgcatagcgttttcccacaggtgacttactataaccgtagcaaattctgcggctctggctatgctcgagaaaattccataaaatgcatttcaaatatactttataaattaaacaaaatgagtaagaagatgcagagcgataaagtgctcaatttgccggcaggctactttggtattgtgttggggacgatagggatgggatttgcctggcgctatgccagccaggtttggcaggtcagccactggttaggggatgggctggtgattctggcgatgatcatctggggattattgactagcgcatttattgcccgactcatacgctttccgcatagcgtgctggcggaagttcgccatccagtgctgagcagttttgtgagtttgtttccggcaacgacgatgctggtggcgattggttttgttccgtggtttcgcccactggcggtgtgcctgttcagttttggtgtcgtggttcagttggcttatgccgcctggcaaactgcgggattatggcgcggatctcaccctgaagaagctaccacgcctggactgtatctgccgacagttgccaacaactttatcagcgcaatggcctgtggtgcgttgggctacaccgacgccggtctggtgtttttaggcgcaggcgttttcagttggctaagccttgaaccggtgatcttgcagcgtctgcgcagtagcggagaattacccacggcactgcggacaagtctcggcattcagctcgctcctgcgctggtggcttgtagtgcctggctgagcgtcaacggcggcgagggtgacacgctggcgaaaatgcttttcggttatggactgctgcaactgctgtttatgctacgtctgatgccatggtatctctcccagccatttaatgctagtttctggagtttcagcttcggcgtatctgcactggcaaccaccggtttgcatctggggagtggcagcgataatggatttttccatacgctggcggtgccgctgtttatctttaccaattttattattgcaatactgctcatccgtacttttgcgcttctgatgcagggaaaattgttagtcagaaccgagcgcgccgttttaatgaaagcagaggacaaagaatgatcattcgtgacgaaaactattttactgataaatatgaattaacccgcacacactctgaagtactggaagcggtgaaagtggttaaaccgggtaaaacgctggatctgggctgtggcaatggtcgtaacagtctttacctggcagccaatggttatgatgttgacgcatgggataaaaatgccatgagtatcgccaacgtcgagcgcattaaatccattgaaaatctggataatttacacacccgagtcgttgatctgaataacctcacatttgatagacagtacgattttattcttagcactgtggtgctgatgttccttgaggctaaaaccatccccgggttgattgccaatatgcaacgttgcactaaacctggtggttacaacctgattgtggcggcgatggataccgctgattatccatgtaccgtcggcttcccgtttgccttcaaagagggagaattacgtcgatattacgaaggctgggagagggtgaaatacaatgaagacgtcggcgagctgcaccgcaccgacgccaacggtaatcgtattaaactgcgtttcgccacgatgctggcacgtaaaaaatgacccggtaagcacaaaacgcgtgaaaattccccacgctgagatgatttactgttcttcttttcggtaagcatattttttatcgaagggatgtgaaattaatcacagtagtcgaagtttttagcagcttaacttactgaaatttaagtactgatgattgacttagcccctttttcggcattgactatgtcgtctgaaaaggggctgaaaaatttattttcaccaacactttttttgccacaacacgaagcggcgctttttgctataacttagaaagtaatataatcatctcaggaaactattcatgcgtaccacaagttttgcgaaagttgcagctttatgcggcttattggctctgtctggttgtgcatctaaaatcacccagccagataaatattctggttttttaaacaattactctgatttaaaagaaacaaccagcgctacaggtaaacctgttttacgttgggtagacccgagttttgatcaaagcaaatatgacagcatcgtctggaacccaatcacttattatccggtaccgaaaccgagcacccaggtagggcagaaagttctggataaaattttgaactataccaacaccgaaatgaaagaagcgatagcgcagcgtaaaccactggttaccaccgctgggccgcgtagtctgattttccgtggggccattaccggtgtagataccagcaaagaagggctgcaattctatgaagtggttcctgttgcattagtggttgcggggacgcaaatggctacaggccaccgtaccatggatactcgcctctattttgaaggtgagctgattgatgcagcgactaataaaccggttatcaaagtcgttcgtcagggcgaaggtaaagacctgaataacgaaagtacgccaatggctttcgaaaatattaaacaagttattgatgacatggcgaccgatgccaccatgtttgacgttaacaaaaagtaattccagacgcgccatcgttagatggcgctttttatccggtgcgccgtaaaaccccatccttcagggcggggatataaggcgcggttttccacctgaccaggtgtttgctgttgttcaatgtattggcggatgacggatattggcgcacctccgcagctactggcaaaatagccaggactccacaaaacgcctttgtagtaatacctgaatgcaatatctggtcgatctcgtcgcagtcacctacccgatacgcctttgaggctgtttaccagactggatatcgccagtttgggaggatagttaattaacaaatggacgtgatctggttcgccatccatttcaaccagttcagcttcaaaatcagcacatacatttgaaaagtaagtgcgtagtttttctgtcgcgtcatggtcaaaaatctggcgtcggtatctggtgacaaagagcaggtgaacatgcatcaggaaaacacaatgccttccacgccggatatcggtttcttttttcacagaccaaagtatcatttgacctgtgaaacgattacaggcatttaaattccagttaagacccggtggtcaacaggagtgtgaaatgaggcgcttcgcaggcgcatgtcgtttcgttttcaatcgtgctctggcacgtcagaatgagaatcatgaggccggtaataaatacatcccttacgggaaaatggcttcctggctggttgagtggaaaaatgccactgaaacgcaatggcttaaagattctcccagtcagccattgcaacagagtctgaaagaccttgagcgggcttacaaaaacttcttccggaagcgggctgcttttccccgattcaaaaagcggggacagaatgatgcattccgctacccgcagggcgttaagctcgatcaggaaaacagccgtatttttctgccgaaactgggctggatgcgctaccggaacagccgtcaggtcacgggtgttgtgaaaaatgtcactgtcagccagtcctgcggtaagtggtacatcagtattcagacagaaagtgaagtaagtactccggttcaccctagtgcaagtatggtcgggctggatgctggcgtggctaaactcgccacgctgagtgatggcacagtctttgagcctgtaaacagttttcagaaaaaccagaagaagctggcgagacttcagcgacagttaagccgcaaggtcaaattcagcaacaactggcaaaagcagaaacgcaaaatacagcgactgcattcctgtatcgcaaatatccgcagggactaccttcacaaagtcacaacggccgtcagcaaaaaccacgcaatgatagtcattgaggatttgaaggtcagcaacatgagtaagagtgcagcgggtacggtcagccagccggggcgcaatgtccgggcaaaaagtggtttaaaccgtagcatactggatcagggctggtatgaaatgcgccgccagcttgcgtataagcagctctggcgtggcggtcaggtgcttgctgttccgccagcgtatacaagccagcgttgcgcgtactgtggtcatacagcgaaagagaaccgcctgagtcaaagtaaattcagatgccaggtatgtggatatacagcgaacgccgatgtaaatggcgctcgcaacattttagcggcggggcacgccgttcttgcctgtggagagatggtgcagagtggccgcccgttgaagcaggaacccaccgaaatgattcaggcgacagcctgaacgtagcagggatccacgtccttcagggcgtggaggatgtcaatatcggtttctgtcagcgattaaattcaacaccacgtaacaaacgcctccggcaattaatccccaaaacgcagaaccaatcccgaccagcgtcaatccacttgccgttaccagaaatgccaccaccgccgcgtctcgctcacgctcattatgcagcgcctgatacaaactgccgccgatggtacttaacagcgccagacctgccagcatctggatccaacttacgggcagggcagccatcatcccggtaatggcactaccaaacagacctgcgagcaaatagaaaatgcctgcaacggcagcggccagccaacgttgatctttatccggatgcgcttccgggctttggcaaatagccgcggtgattgccgcaataccgacggaataaacgccgaaaggggaaaaaaccagtgccagcaatccagtaaatacaattaatgggctaacaggagcgctatatccagctgctttcattgctgcgatacccggtgcgttttggcttgccatcgtcaccagaaaaagggggagtgcaacgctcaggctgtgagcaaagctaaaatcaggggtaatataagtggggagaacgggtttaaagacaacatcagttgtgacaacgtcaccttgcgcgatgacgatcacgatcccaataatcatcgcggcaattaccgcatagcgcggcgcaacggccttggttgccagccataccagcaacatacttccacacaacgtaaattgaccgtccagactggcaaacgcctgtaaaccaaagcgtaataaaatcccggcaagcattgccgccgcaaggctgtgcggaataatgcgcatcagacgagcaaagagtcccgttatgccgcagaggactattagcgcgttggtgacaataaaaacgccgatggcttcgttaagtgttagtccctgcaatccggtgaccaacaaagccgcgccaggcgtactccatgcggtgagaacaggtacgcgataccataatgtcagagtcagcgtactgacgcccattgccagccccagcgccgtcatccagccagagatttgtgcagtggtggctccggcgacaatcgctgcttgccagattattgccgcactactggcgtagccaattaataccgccagaaaccccgccagtagcgtgggtggaggaatagaaaacagacgcatagtcacctcgtgcgttatagcgtacaggcaccgtagcatttgtccgttataacgcacaagtgataaacttccgttttgccggaggagtcgcatggaaaatctcgctcgctttttatccaccacacttaaacaactacgccagcagcgcggctggagtcttagccgactggcagaagcgacgggcgtttctaaagcaatgttagggcagattgagcgtaatgagtccagtccgacggtcgcgacattatggaaaattgccaccgggttgaacgtaccatttagtacatttatttctccgccgcagtccgctacgcctagtgtttatgatccacaacagcaggcgatggtgatcactagcctgtttccttatgatccacaactctgctttgaacacttcagcattcagatggcatctggtgcaataagcgaaagcacgccccatgagaagggggtaatcgaacatgtcgtcgtcattgatggacaacttgatctgtgcgttgatggggaatggcagacccttaattgtggggaaggcgttcgatttgctgcagacgtcacgcatatctatcgtaatggtggggagcaaaccgtacattttcattccctcatccattacccgcgcagttaagcgggaaaactatttcgcaacgtcgcgcttgtggctaaaatagccgccatttttcagctactggataagaatgtgaccgtatcttctcatcgacttgaactgttaagcccggcacgcgatgccgccattgcccgcgaagctattttgcacggtgccgatgctgtttatatcggcggccctggttttggtgcccgtcataatgccagtaatagcttgaaagatattgccgagctggtgccgtttgcccatcgttatggtgcaaaaattttcgtcacgcttaacaccattttgcatgatgatgagctggaacccgcgcaacggctgattactgacctctaccagaccggtgtcgatgcgctgattgttcaggatatggggattctggaacttgatattccgccgattgaactgcacgccagtacgcagtgcgacattcgtacagttgaaaaagcgaagttcctctctgatgttggcttcacgcagattgtgctggcgcgagagctgaatcttgatcagatccgcgcgattcaccaggctacggacgcgaccattgaattctttattcatggggcactgtgcgtggcctatagcggtcagtgctacatttctcatgcgcaaacagggcgtagcgccaaccgtggcgattgcagccaggcgtgccgtttgccatacacattgaaagacgatcaggggcgggtggtttcctatgaaaaacatctgctgagcatgaaagataacgatcagactgccaacctcggcgcgctgattgatgctggtgtacgctccttcaagattgaagggcgttacaaagatatgagctacgtgaagaatatcaccgcccattatcgccagatgcttgatgccattattgaagaacgtggcgatctggcgcgcgctagtagtggtcgtactgaacatttctttgttccaagcacggaaaagactttccaccgtggtagcacagattattttgtgaatgcccgtaaaggcgatattggcgcgttcgatagcccgaaatttatcggcctgccggtaggcgaagtagtgaaagtggcgaaagatcatctcgatgttgccgttaccgagccactggcaaatggcgatggcctgaacgtgttgattaaacgtgaagtcgtcggttttcgtgccaatacggtcgagaaaaccggagaaaatcagtaccgcgtctggcccaatgaaatgccagcagatttgcacaaaattcgtccacatcacccactaaaccgtaatcttgatcataactggcagcaggcactgacaaaaacctccagcgaacgtcgggtggcggtagacattgaactgggcggctggcaggaacaactgattctgaccctcaccagtgaagagggtgtcagcatcacgcatacgctggacgggcagttcgacgaagccaataacgccgaaaaagcaatgaacaatctgaaggatggtctggcaaaactggggcaaaccctctattacgcccgcgatgtgcaaattaatttgccgggggcgctgtttgtaccaaacagtctgttaaaccagttccgccgtgaagctgctgacatgctggatgctgcgcgtcttgccagttaccagcgcggcagccgtaaaccggttgctgatcctgcgccggtttatccgcaaacgcatctgagtttcctcgcgaacgtatacaaccagaaagcgcgtgaattttatcatcgctatggtgtgcagctgattgacgcggcgtatgaagcacatgaagagaagggcgaagtcccggtgatgatcaccaagcattgtctgcgctttgcctttaatctgtgcccgaaacaggcgaaaggcaatatcaaaagctggaaggcgacgccaatgcaactggttaacggcgatgaagtattaacgctaaagtttgattgccgcccatgcgagatgcacgtcattggcaaaatcaaaaatcacatactgaaaatgccgttaccgggaagcgtagtggcatccgtaagtccggatgagctgctgaaaacattgccgaagcgaaaagggtaaaacgccagttttctggttactcacaacttattgaatctgcatgatattgcctgccgggtaaggcgttacgccgcatccggcatcaaatgactcaacgttgtcccgcttctggtttgcggcttttttgccagtaaaaatgctcgcgcaaaccttccgcgctctcttccgccacagcacgcaattcatcgctgtccgcttcatgacgcagctgatgatccacattctttacccacacaaattcatgtcctttgtgccctgccatgagttgtccactaaacagagcacacgttaataagacaacgcttaacgccttcgtaaacatcctgccacctttttcttaccttttgccgctatgatgccgatcgtttcttgaggttattattcagttttgcaaattagcgcaaagaaattctggaatcttccttcctgattttgcattgcattctgccgttgcggcgatttagtgctattttcgagcaaattacacacggaggtaaacactaatgtttactttgttgatatactcagcggcagggaggcgatgtgaaacaaagcgagttcagacgttggctcgaatctcagggcgtcgatgtagcgaatggcagcaaccatttgaaactcaggtttcatgggaggcgcagtgtcatgccgcgtcacccctgcgatgagattaaagaaccattgcgtaaagcaatcctgaaacaactcggtttgagttaatcgccaattaaaaaggttaatgacatgcgagagacagtcgaaattatgcgttatcccgtcactcttacacccgcgccggaaggcggttatatggtttcttttgtggatatccctgaagcgttgacccagggcgaaactgtcgctgaagcgatggaagcggcaaaagatgctttactgaccgcatttgatttttattttgaagataacgagcttatccctttacctagcccattaaatagtcacgatcactttattgaagtacctttgagcgtcgcctctaaggtattgctgttaaatgcttttttacagagtgaaatcactcagcaagagttagccaggcgaattggcaaacctaaacaggagattactcgcctatttaacttgcatcatgcgacaaaaatcgacgccgtccagctcgcggcaaaggcgcttggcaaagagttaagcctggtgatggtttaattacagttaacgaaaagttgtcatttttaacaactgatatagactgccgaatcatctgcacataattacgattcgataatgaaaaaataccagcagcttgcagaacaattacgcgagcagattgcgagcggtatctggcaacccggcgatcgtttgcctagcttgcgtgaccaggtggcgcttagtggcatgagctttatgactgtcagccatgcctatcagttgctcgaaagtcagggatatattatcgcacgaccgcagagcggttattacgttgcgccacaggcaataaaaatgccgaaagcgccagtcattccagtcactcgagatgaagcagtcgatatcaacacttatatttttgatatgttgcaggccagtcgcgatccgagcgtcgttccgtttgccagcgcctttcccgacccgcgacttttccccctccaacaactaaaccgcagcctggcgcaggtaagcaaaaccgccacagcgatgagcgtgattgaaaacttaccgccaggaaacgcagaactgcgtcaggctattgctcgtcgctatgccttacagggcatcaccatttctcctgatgaaattgtcattactgccggggcgttagaggcattaaacctcagtttgcaagcggtaactgaaccgggcgattgggtgatagtagagaatccttgtttctacggtgcgttgcaggcgctggagcggctacggctgaaggcgttaagcgtggcgacggatgttaaagaagggatagatcttcaggcgctggaactggcgttgcaggagtatccggtgaaagcgtgctggctgatgactaatagccagaatccactcggatttaccttaacgccgcaaaaaaaagcacaactggtggcgttgctcaatcagtacaacgtaacgctgattgaagatgacgtttacagcgaactttattttggacgggaaaaaccgctgcctgcgaaagcgtgggatcgccacgatggcgttttgcattgctctagctttagcaaatgtctggtgcctggttttcgtattggttgggtcgccgccggaaaacatgcacgtaaaattcaacgcttgcagttgatgagtacgctttccaccagcagtccgatgcaacttgcgctggtggattacctttccacgcgccgatacgacgcccatcttcgtcgcctgcgtcgccagcttgcggaacgtaaacaacgtgcctggcaggcactgctgcgttatctgcctgcggaagtgaaaattcatcataatgacagtggttactttctctggttggagctccccgagccgttagatgccggcgaattaagcctggcggcactgacgcatcatatcagtattgcgccgggtaaaatgttttctaccggtgaaaactggagtcgttttttccgttttaataccgcgtggcagtggggagagcgtgaagaacaggcggtaaaacaattaggcaaacttattcaagaacggctgtaatagcgtttaatttaattcctcttagattgggtaatatgaatttcgaatagcagtcatatttcctaactccttgactatactccagaagataaccttacagacggcataatgcgcggtagctcacaacctgaataaattttctcaggggcgaaggtgtgcctgcaagccgccgtctatggttaaacaaggagatatttttacggcacggcggctgaacaattaattacgacaggagtaagaccttatgagcaagacatttgcccgcagcagcctgtgtgcgctcagcatgacaataatgaccgctcacgccgccgaaccgcctaccaatttagataaaccggaagggcgactggatattatcgcctggccgggatacatcgaacgcggacaaactgataaacaatacgactgggtaacgcagttcgaaaaagagacaggctgcgcggtgaatgtgaaaaccgccgcgacttccgatgaaatggtcagtctgatgaccaaagggggttacgatctggttacggcatccggcgatgccagcctgcgtttgattatgggtaaacgcgtgcagccgattaataccgcattgattcccaactggaaaacgctcgatccgcgcgtggttaaaggcgactggtttaatgttggcggcaaagtttacggcacaccttaccaatgggggccgaacctgctgatgtacaacactaaaaccttcccgacgccgccggatagctggcaagtggtttttgttgagcaaaatctgccggacggcaagagcaataaaggccgcgttcaggcttatgatggccctatctatattgcggacgctgcgttgttcgttaaagccactcagccgcagttgggcatcagcgatccgtatcaactcaccgaagaacagtaccaggcggtgctgaaagtgctgcgcgctcaacacagtttgatccatcgctactggcatgacactaccgtgcaaatgagcgatttcaaaaacgagggtgtggttgcttccagtgcctggccctatcaggccaacgccctgaaagccgaaggccagcctgttgctaccgttttcccgaaggagggtgttaccggttgggctgataccaccatgctgcatagcgaagcgaaacatccggtttgcgcctacaaatggatgaactggagtttaacgccaaaagtgcagggcgatgtggcggcctggtttggcagcttaccggtagtgccggaagggtgtaaagccagtccgttattaggcgaaaaaggttgtgaaaccaacggttttaactatttcgacaaaatcgccttctggaaaacgcctatagcagaagggggcaagtttgttccctacagtcgctggacgcaggattacattgccattatgggcggtcgctaacttcgctggggtgctttatgacgtacgcagtggagtttgacaacgtcagccggttgtacggtgacgtgcgcgcagtagatggcgtcagtattgcgataaaagatggtgagttcttctctatgctggggccgtccggctccggcaaaaccacctgcctgcgcctgattgctggcttcgaacagctttccggcggggctatctctatctttggtaaacccgccagcaatctgccaccgtgggagcgggacgtgaatactgtctttcaggactacgcgctatttccgcatatgagcattcttgacaatgtcgcctatgggctgatggtcaaaggcgtgaataaaaagcagcggcacgcaatggcgcaagaggcgctggagaaagtggcgttggggtttgtacatcaacgtaaaccgagtcaactttctggtggtcagcgccagcgggttgctatcgccagagcattggtgaatgaaccgcgcgtattgctgttggatgaaccgctcggcgcactggatctcaaattgcgtgagcagatgcagctggaactgaaaaaactgcaacagtctctcggtatcacttttatcttcgttacccacgatcagggcgaagcgttaagcatgtccgatcgtgtggcggttttcaataatggacgcattgagcaggtcgattccccgcgcgatctctatatgcgcccgcgcacgccgtttgttgccgggttcgttggtacaagcaatgtttttgatggactgatggcagagaaactttgtggcatgacgggaagcttcgccctgcgaccggaacatatccgcctcaacacccctggtgaactgcaggccaatggcacgatccaggcggtgcaatatcagggcgcggcaactcgttttgaactgaaattgaacggcggtgaaaaactgcttgtgagtcaggccaatatgacaggcgaagaactgcctgccacgctcacgcccggacaacaggtgatggtttcctggagccgtgatgtgatggtgccgctggttgaggagaggtgaatggcgatgaatgtattgcaaagtcctagtcgtccaggtctgggtaaggtgtccggtttcttctggcataatccggggctggggctgtttttactgctgcttggcccgctaatgtggtttggcattgtctatttcggcagcctgctgacactgttatggcagggattttatacttttgacgatttcaccatgagcgtaacgccggaactgacgctggcgaatatccgtgcgctgtttaatccggcgaattacgacatcattctccgcacgctgactatggctgtggcagtcactatcgccagcgccattctggcttttccaatggcgtggtatatggcgcgctataccagcgggaaaatgaaagcgtttttttatattgcggtaatgttgccgatgtgggcgagctacattgttaaagcctatgcctggacgttattgctggcaaaagatggcgtggctcagtggtttttacaacatcttgggctggaaccactgctgactgcgttccttacattacctgcggtgggcggaaatacgctgagtacttccgggctggggcgctttctggtgtttctctatatctggttgccgttcatgatcctgcccgttcaggcggcgcttgagcgtttgccgccgagtttgttgcaggcgagcgctgatctcggcgcacgtccacgacaaacctttcgctatgtggtgctgccgctggcaatcccgggtattgccgctggctctatctttaccttcagtctcacactgggcgattttatcgtcccgcagctggttggtcctccaggatattttatcggcaatatggtttattcccagcagggggcgattggcaatatgccgatggcggcggcattcaccctggtgccgattattctcatcgcactgtacctggcgttcgtgaaacgtctgggagcgttcgatgcactctgaacgcgcaccgtttttcctcaaactggcggcctggggcggcgttgttttcctacattttcccatcctgataatcgccgcctatgcgtttaacactgaagatgcggcgtttagttttccaccgcagggcctgacgctgcgctggtttagcgtggcagcacagcgtagtgatattcttgatgccgtgacactgagtcttaaagtggcggcgctggcgacattaattgcgctggtgttagggacgctggcagctgccgcgctgtggcgacgagactttttcggcaaaaacgccattagcctgttactgctgctgcccattgcgctgccgggcattgtcactggtctggcgttattaaccgcctttaaaaccatcaatctggagccgggatttttcaccatcgtggtcggtcatgcgactttttgtgtagttgtggtgtttaacaatgtcatcgcccgttttcgccgcacctcctggagtctggttgaggcgagtatggatcttggggccaatggctggcaaaccttccgctacgtagtgttgccgaatctcagtagcgcgttactggcaggaggaatgctggcgtttgccttgagcttcgatgaaatcatcgttacgacctttacggcaggtcatgaacgaacgttaccgttgtggttgctcaatcagcttgggcgaccgcgtgatgtaccggtaactaacgtggtggcactgctggttatgttggtaacaaccttgccgatcctgggggcctggtggctaacccgcgaaggcgacaatggtcaataaccactgatacaggaatatgctatgcaacataagttactgattaacggagaactggttagcggcgaaggggaaaaacagcctgtctataatccggcaacgggggacgttttactggaaattgccgaggcatccgcagagcaggtcgatgctgctgtgcgcgcggcagatgcagcatttgccgaatgggggcaaaccacgccgaaagtgcgtgcggaatgtctgctgaaactggctgatgttatcgaagaaaatggtcaggtttttgccgaactggagtcccgtaattgtggcaaaccgctgcatagtgcgttcaatgatgaaatcccggcgattgtcgatgtttttcgctttttcgcgggtgcggcgcgctgtctgaatggtctggcggcaggtgaatatcttgaaggtcatactagcatgatccgtcgcgatccgttgggggtcgtggcttctatcgcaccgtggaattatccgctgatgatggccgcgtggaaacttgctccggcgctggcggcagggaactgcgtagtgcttaaaccaagtgaaattaccccgctgaccgcgttgaagttggcagagctggcgaaagatatcttcccggcaggcgtgattaacatactgtttggcagaggcaaaacggtgggtgatccgctgaccggtcatcccaaagtgcggatggtgagcctgacgggctctatcgccaccggcgagcacatcatcagccataccgcgagctccattaagcgtactcatatggaacttggtggcaaagcgccagtgattgtttttgatgatgcggatattgaagcagtggtcgaaggtgtacgtacatttggctattacaatgctggacaggattgtactgcggcttgtcggatctacgcgcaaaaaggcatttacgatacgctggtggaaaaactgggtgctgcggtggcaacgttaaaatctggtgcgccagatgacgagtctacggagcttggacctttaagcagcctggcgcatctcgaacgcgtcggcaaggcagtagaagaggcgaaagcgacagggcacatcaaagtgatcactggcggtgaaaagcgcaagggtaatggctattactatgcgccgacgctgctggctggcgcattacaggacgatgccatcgtgcaaaaagaggtatttggtccagtagtgagtgttacgcccttcgacaacgaagaacaggtggtgaactgggcgaatgacagccagtacggacttgcatctagcgtatggacgaaagatgtgggcagggcgcatcgcgtcagcgcacggctgcaatatggttgtacctgggtcaatacccatttcatgctggtaagtgaaatgccgcacggtgggcagaaactttctggttacggcaaggatatgagtctttatgggctggaggattacaccgtcgtccgccacgtcatggttaaacattaaggataatattgcagatcgtaagagtatgagatgatcttgcgtactgtcagagcactgatttctctgacagtacgtgctgcgtgcaaaatcactacatcaaataaaccagccaaatctcatagagataagagtaaacaaaccaacagcagcaaagaaatttatcagtactacagttctactggaaacattcatttttgccaccttttatcattgcccctatgtgtatagtacgggttaagaaaatccgcaataatactcattctgaagatggataagggcaagttgctgtttgatgattttttctcaaactggtgaaaaaacttgatgcacgtcaaaaaatgacgcatatttgcgcgcgttttattcatctggctggacgcccgtacatgtctctctatcaacacatgcttgttttttatgcggttatggcagcaatcgcatttcttatcacctggtttctttctcacgataagaaacgcatccgtttcttaagcgcctttctggtgggggcaacatggccgatgagtttcccggtggcgctgttgtttagtctgttttaaatcttactcactggcttgacggcaccacgcagacttatatcatttggatgaatcgataaatttcacaagtggctaaggagaaagtatgagccatctggatgaagtcatcgcgcgcgtggatgccgcgattgaagagagcgtcattgcccatatgaacgaattattaatcgccctgagcgatgacgcggagttaagtcgggaagatcgctacacccagcagcaacgtctgcgcacagcgatcgcccatcacggtcgcaagcataaagaagatatggaagcgcgccacgaacagttaaccaaaggcggcaccatcctctgattaaaaactgcgtctggctaccaaccaggcgccaaccacaagtaaaattgcgccacaaattgggccgaacaacgcccgtagtggtacgccatgactgcggaagatatccagcatcagaccgccaatcagctgactggcgaccagtacagcaatagttgtcgccgctcccacattctgatatccgctgatactggcgaagacaaaaaagcttcccagcaagccaggtataagtgtccaccagcgcacgctggacaccagttcgccaaaccccgccatgccttgtttaaaccataaaatagaaacaaagagcacaatccccaccagactgttcagcaacatggcgatgagaatggtagaggaggtctgggtgatgcgcaccatcagcgtgttctggacaaccagaccaattccggcggcaatcaaaaaagcaagggtgaggctctgattcatccaatcgcgtccggttcagtgcgctcgtcgagttgcaactgcataaatgtcagatccagccaacgaccaaatttagtgcctacctgcggcatttgcgcggtgacgacaaatcccaggctctggtggagatgcaggctggcctgattttggctttcgatcccggcgaccatgacatgcttcccgcaatcccgcgcttcatcaatcaatcggcttaacaatttacgccccagacctttgccctgatgatcgggatggacataaacgctatgttccacggtatggcgaaaaccatcgaaactacgccagtcgccaaagctggcatatcccgtcactacgccgttttcctcgctcaccagcactggataacctgctaaagtccgcgcttcaaaccaggcaatgcggttatcagcatccaccgtttggtcattccagatagccgccgtatacaacacggcgtggttataaatttccgcaatggcagcacagtcggctttgcgggcaaaacggatggacatgtctggcctcaataaaataatgatgatgatgttatcaatactatcgaaaacagcccgaagcaacggattcctcgatgaaattattgcgtgttgcagaggggatgtgacggctgcaaacaaaaccaatcccgtgagcctgctactattgatggattcatgccaaaagcacaggagagcattatggggcaacaaaagcagcgtaatcgacgttgggttctggccagccgtccacatggcgcacctgttccggagaatttccgtcttgaagaagatgatgtcgccacaccgggtgaaggacaggtgttactgcgcacagtttatttgtccctggacccgtatatgcgtggacgtatgagcgatgagccatcttatagtccgcctgttgatattggcggcgtgatggtcggcggtacggtgagccgtgtcgtggagagcaatcatcctgattatcagtctggcgactgggtgctgggctacagtggatggcaagactatgacatatccagtggtgatgatctggtgaaacttggcgatcatccgcaaaatccaagctggagcctgggtgtgctagggatgccaggctttaccgcttatatgggcctactggatatcggtcagcctaaagagggcgaaacgttggtggtagctgcggcgacaggaccagtgggggcgacggtggggcaaatcggcaaacttaaaggttgcagagtggtgggggtagccggtggcgcggaaaaatgccgccatgctaccgaggtgttaggcttcgatgtttgtcttgatcaccacgcggatgattttgccgaacaactggcgaaagcgtgcccaaaaggtattgatatctattatgaaaacgtgggcggtaaggtattcgatgcggtgctaccgttacttaatacatctgcgcgcattcccgtctgcggattagtgagcagctataacgctacagagctaccacccggtccggatcgtttacctctgttgatggctacagtgctgaaaaaacgtattcgcttgcaaggttttattatcgctcaggattatggtcaccgcatccatgagtttcagagggagatggggcaatgggtgaaagaggataaaatccactaccgcgaagaaattactgacggtttagagaatgcgccacagacgtttatcggcctgctgaagggtaaaaacttcggcaaagtggtgatccgcgtggcgggtgatgattaaagtttcaacggcggcgtaagccgccataaaaatccaggcaaaaagcttattttcagctttaattaactaaccacatcattgttctgctgctaataacaacaaaggtgagtggtttatgattattcactttaatacaccaggtgaattccttctgccatgcaggcagggttggacagaaaacacgcgaaggaattaaaatgcctggaacgggaaaaatgaaacatgtcagtttgactctgcaggttgagaacgacctgaaacatcagcttagtattggcgcattaaaacctggcgcacgcctgattactaaaaatctggcggagcaattaggtatgagtattacacctgtgcgtgaagcattattacgtctggttagcgtgaatgcgctttctgtcgcacctgcacaagcatttacagttccggaagtggggaaacgtcaattagacgaaatcaatcggatccgctacgaactggaattaatggcagttgctctggctgttgaaaacctcaccccgcaagaccttgcggaactccaggaattgctcgagaaattacagcaggcgcaagaaaagggcgacatggaacaaatcattaatgtaaacaggctatttcgcttagcgatttatcatcgcagtaatatgcccatcctgtgtgagatgattgagcaactgtgggtcaggatggggcctggtttacattatctctatgaagcgattaatccagcggaattacgggagcatatagaaaactatcatctgttactcgctgcgttaaaagcaaaagacaaagagggatgcagacattgtcttgctgaaattatgcaacaaaatattgctattttataccagcaatacaatcgttaaagtaaatgcccggcaaataccgggcatcaaggtaattactcaaatctccacgcaatattcatgccgacaccataatttcgtccggggctaggttcgtaatatcgcccgttactctcattgacaatgacagaaccaacgtattctttatcgaataaattatcgacacgaccaaataaatccacagttaaattgtggtaattgtatttatacccggtgaataagccgacgagagtataagacggcgcttttgccgtattttcatcatctgccataatatcgcccatataacgcgcttccgtgcctgcataccaaccatcttccggtacataacctatgctcgcaaagcccatattacgggcgatccctggcatccgattaccgttacaatcctgttcattgcaaacattgctgcgataggtcgcatcaagccaggtccaggacgcgtttacgcgaaaatctcctgcgaaacgttgatcccatgccagttcagcgccttgacgacgggtctttccggcatttttgtaagtcgtacgcccaccgctactgctatcgacaacaatttcatcatcagtgtcggtctgaaacaatgcgagactaagcagcccatcaccaatacgcgttttactgccgatctcaattgtatcgttggtggatggttttaaacctaagttcataccgctttgcccatcagcacgataagacagctcattaatcgtcggcgtttcaaaacctcgcccggctgccagatagatattccaggcatcggtcattgcatattttaagctaccggcaggtagccatttatgataactggcatcaccgctgtcatcgccgttacccggagtaacgtaatggtcgttggaatcaaaccacacggagctgtagcgcacgccagcatccaggctcagtttttcgctcagctgccactgcgtctgtaaatagggatcgatgttccacatcagattgcgttcgtcgcgacgcaactcacctttttgcccgtactccggcatgccgctattcaggcggaagttattgtagcccttgcggttttcactcatgttttcgtagttcaggccggtagtgaacgtgaccggaacgcccagttcaccacggtgtgtccagcggctgtctattccctggtaatggcgttgcagggtaatcacgccgcccgcatgactcgggttaagttgtggtgccatgggtatactctggtactgggtcgtttctcgctctccggcatacatcatcacactcatatcatcccggctactcaggctacgctcatagcgcaacccagcctgagtttgcttgatggtttttcgcgtgtcgtactgttctgcacgaggcgcttgttgtggattagccttccattctgctttggttagcccacctgggtcatctgctttgatatccacactattgaaaatcagacttaatttgctggcttcatcaatgcgtacgcccagtttggcattggctaaatttttctgtgcgccactatggtcacgatagccgtgggtcgtaaaacgcgtggtactgacggtgtaatcgacatcgccaggctgtgtgccgtctcccgttgcgcccgttgctttcagcccatagcgccagctgccaaaactgccgtagtaactactggcttcaatggttggtggctgttgtccggtctgggtggtgacattcattaccccaccagacgcgttgccatacagggcagagaaggggccacgcagcacttccacattttgcacactgcttaaatcgatgttggatgtttgcccttgcccgtcgggcatggtggcgggaataccgtccacatacaggcgaataccgcgaataccgtaagtggagcgggagccaaatccgcgaatgctcagctgtaaatcttgcgcatagttctgccggttttgtacctgcaaaccaggcacgccggtcagactttcggacaagttaatgcgcggtgttgccaggcgcatctcctcgccatccaccacgcttactgctgctggggtatccagttcactaaccacctgcggtgcggcactgacaatcatagtctgttcatcagcggcaaaaacaacgggggaaaggacaagcagtgcgggcaaaacggtctgtcggacggaaaaaatcttcatgaaaaaagccaggttaagaatgggaaaacgccgtcatggtaatgaaattgtaaatttatggaaaatgaaacggcacaatacgttaagtaattgagaaaattgtagtcgtaacggcaagaaatgctccacatttgagaaaataatgattaccattcccatttataacaagagcgtaacgatgattacgcttagcgaagcattgtgaagcagcaaaaatatcggttcatcaaagggagtcgtcatgcatttacgtcatctgtttagtagccgcctgcgtggtagtttactgttaggtagtttgcttgttgttagtagtttcagtacgcaggccgcagaagaaatgctgcgtaaagcggtaggtaaaggtgcctacgaaatggcttatagccagcaagaaaacgcgctgtggctcgccactagccaaagccgcaaactggataaaggtggcgtggtttatcgtcttgatccggtcactctggaagtgacgcaggcgatccataacgatctcaagccgtttggtgccaccatcaataacacgactcagacgttgtggtttggtaacaccgtaaacagcgcggtcacggcgatagatgccaaaacgggcgaagtgaaaggccgtctggtgctggatgatcgtaagcgcacggaagaggtgcgcccgctgcaaccgcgtgagctggtagctgacgatgccacgaacaccgtttacatcagtggtattggtaaagagagcgtgatttgggtcgttgatggcgggaatatcaaactgaaaaccgccatccagaacaccggtaaaatgagtaccggtctggcgctggatagcgaaggcaaacgtctttacaccactaacgctgacggcgaattgattaccatcgacaccgccgacaataaaatcctcagccgtaaaaagctgctggatgacggcaaagagcacttctttatcaacattagccttgataccgccaggcagcgtgcatttatcaccgattctaaagccgcagaagtgttagtggtcgatacccgtaatggcaatattctggcgaaggttgcggcaccggaaagtctggctgtgctgtttaaccccgcgcgtaatgaagcctacgtaacgcatcgtcaggcaggtaaagtcagtgtgattgacgcgaaaagctataaagtggtgaaaacgttcgatacgccgactcatccaaacagcctggcgctgtctgccgatggcaaaacgctgtatgtcagtgtgaaacaaaaatccactaaacagcaggaagctacccagccagacgatgtgattcgtattgcgctgtaatagatatggcgagggtgaaaacggtgagacttgcctgccttttatcacggcgtatccggcactttcgtcagtaatctgaatttgcccggcacgtagccgggcaattttgcaattaactcgccgtttcaggcttaaacacaatttcctgtttttcttcatcttcctcgacgactggcgcagtgctgtgaatttcagcaacgcgtttgcgcacaccaaaccagcctataaccagcaaaataccgataatcggcagcgccgcgatagtataagtcccgttcgggtaatcgaacgccatcagcacaaggacactcagtaaaaacagtaatgtcagccaggaagtgaagggcgcgccaggcagtttaaaactgacatccgctgctttgccttctttaatcgctttacgcaggcgcatctggcacacgatgataaacgcccaactagcgatgattcccaggctcgcgaagttcaacacaatctcaaatacgcggctcggcaccagatagttgaggaatacgccgacgacatacacaactagtgtcgccagaatcccggcatacggcacatgctgacgactcattttcgccataaaactcggtgcggaaccgcccatcgccatactgcgcagaatacgtccggtgcagtacagaccactattcaggctggagagggcagcggtcagcaccacaatgttcataatgctgccgatatatggcacacccagtttagagaaaaacgtcacgaacggactttgccccgcctgatacgcgctccacggcaataacataaccagcaacaccacggagccgacgtaaaacaggccaatacgccaaatcacactgttaatggctttaggcaccatggtctgcggatctttacattctccggcagctgtacccaccatttcaatggaggcaaaagcaaacactacgccctgaatcaacaccagcgcaggcagcaaaccgtgggggaagaagccgccattatcggtgattaaatgaaagccagtggtgttgccatccagcggctgaccactaccgaggaacactgtacccacgaccaaaaaggtcacaatggcgagcactttaataagcgcaaaccagaactccatctccgcaaaccatttcacaccgatcatattcatggtgccaacgatggtaagtgcagcgagcgcaaagacccactgcggcacgccgccaaacgcaccccagtaatgcatatacagagcgacggcggtaatatcaacaatccccgtcatcgcccagttgatgaagtacatccagccagcaacataagcggctttctcacccaaaaactcacgggcataagaaacaaaactgccactggaagggcggtgtagcaccagctcacccaatgcacgcagaataaaaaagctaaacaagccacaaattaaataaaccagtgccagtgcgggccccgccatttgcagtcgggctcctgcacctaaaaacaagccggtgccaatcgcgccgccaatggcgatcatctgcacctggcgattgcccatcgctttgtgatacccctcttcgtgggcattaagccagcggcgtttcgcggcgtgttgatcactagtgtcggtgtcgtgtttactcattgctctccctgattgctttaatgaaaaagtcatataagttgccatgaacaatgtttattcatcctggcgatgatagttatcaccattattctttatgggtataaaactatcggcgcagcatcctacccgttatcgataaacgatgcaaaacatccccttacaatcctgaaggggattaatacaactgacgaaaaaatgacaaatccttttgctggttaacctgtgtactgtcctacacttaatctttaaaagattgtgaggggcatatgattaaggtgtatggcgtacccggatggggctctacaatcagtgagctgatgctaacactggctgatattccttatcagttcgttgatgtcagtggttttgaccacgagggagctagtcgcgagttattgaaaaccctgaacccgttgtgtcaggttccgacactggcattggaaaatgacgagattatgacggagacagcggcgattgcattgatggttctcgatcgtcgcccggaccttgcgccaccggttgggcgcgccgaacgtcagctgtttcaacggctattggtctggctggttgctaatgtctatccaacattcactttcgccgattaccctgagcgttgggctcctgacgcacctgaacagttaaagaagaatgttattgaatatcgaaaaagcctttatatctggttgaatagccagctcactgctgaaccttatgcgtttggtgagcaactaacgctggtggactgttatctttgcactatgcgcacatgggggcctgggcatgaatggtttcaggataatgccacgaatatcagtgcgattgctgatgctgtatgtcagttaccgaaattacaagaagtattaaaaaggaatgaaattatttgagtgggataccagaagattatgttatttattattcagtaactttatccacaatgatgggcgtaattaattaaattcatggtatgttttttaatttatatcactctccttttcattcagcgtgtctatttcatttcctctgaaaagaaactaactattcacatcgtgcagatgtttcagttgttaagtcaggcattctataatctcaaaatgtttttaatgatggatatgctcggagttggagatgcaattaatattaatacaaataaaaatatccggcaggtatgctaaaaggataaatggcgttctctgtatttattcgcaattatctgtaggacaaatatggagagcttgatgagtcagagctaaaacagcaattgattaataaacatgttgatttattcaagaaaatggatgtattttaaatgttgattcttaatataacctaatcaatagattatcaagtgagagctacacattattggaggggcaggggaaaacaccattttgggaacaatgcatcaggtactcttaccactgaagcaagatcatccggcaccaggtggtggtgcagtgctttggaaatggtcccctcgggggagttgtcattattttctatgctatttgcttattatattcatcaggtgaatttaataaattcctaatttgaaatatccactattaagctagtgtttaacgacgttaagatggcaatgtgcagatcatgttatcagggtggggcggtagcgtatattccttatacaaaccatcattcatttcaatgattgttattgaattatttattgttgtgaataaaaagacattatgaatattggtttgactttgcatatcaggttttttattactcgctgtaatgtacgagcctgtcgtgaataacgtcgagaacccatccgttgcgtttgtgattattttgttgactaaacagacacccgtttctctgaagtaaaatcccagactaaatcatcacataaccatgacatttttctgatattccccggtaacgccagataacgatgccaaatttaccgttatgttcaatcaactccctggtccatgtcgatttatctaccacaatcgccacgcgtggaggttcaaactccaccggcattgaccaggctgcagccataatgttacgccgctgggattgctcatcgaaactggtgatcaagaccgttgggccatgatttaacagacggctggcatggtgtaattctatggggatgaatcggctcatggtatcgcctcgcgaagaaggtttttttaagcgtagtccgtaacgcaataagtaacgaaattaacgggattggcgatttgcgaacgtgatgcatgtccgcgatcgcacaaaatagccggtgcggcgtctattccaggttataagttgagaaaaccactaagggaaacgcctgatgacgcccattctgaatcactattttgcccgtattaactggagcggagctgctgcggtcaatattgatacgcttcgtgcattgcacctgaaacacaattgcaccattccgtttgaaaacctcgacgttttgctgccgagggaaatacagcttgataatcaaagcccggaagagaaactggtgatagcccgtcgtggcggttactgttttgagcagaatggcgtgtttgagcgggtgttacgcgagctggggtttaacgttcgcagcttgttagggcgcgtagtgttaagtaatccgccagcattaccgccgcgcacccatcgtttgctgttggtggaactggaagaggaaaaatggattgctgatgtcggtttcggtgggcagacgctaaccgcgccgattcgtttagtttccgatctcgtgcagaccacgccacacggagagtatcggttgttgcaggagggtgatgattgggtgttgcagtttaatcatcatcagcattggcagagcatgtaccgttttgatctctgcgagcagcaacaaagcgattatgtgatgggcaatttctggagcgcgcactggccgcagagccattttcgccatcatttgctgatgtgccgccatttgccggacggcggcaagctgacactgaccaattttcattttacccattatgaaaatgggcacgcggtggagcagcgaaatctaccggatgtggcgagtttatatgctgtgatgcaagaacagtttggtctgggcgtggatgatgcgaaacatggctttaccgtggatgagttagcgctggtgatggcggcgtttgatacgcacccggaggcgggaaaataatttatgtcaggttgccggatgcggcgtaaacgccttatccggcatacattagcccggttgtagacctgacaggcgaagcgcatcagacaacggtttcagagttcaattgcccattcggcatgaaacaaaatcaccgctgtgccactaatggtgactttttccggttggttatcacgaattgtcaccgtcacttcaatcataccgtcacgccccaatgcgcgcccctgatggcctttaacacgcaacacgttgccatcgtggggcaatacgttgtgatgtaccaaccatgcacccatcgggccattggcattgccagtcaccggatcttccacaataccaatcgcagggctgaacatgcgaccatcggtttcgtttttgcctgggcggatctggaacgggaagaaaccattgcagccaatctttttgctgatagcggtcagcgcattaaggtcagggctaagggcgtcgatatccacttccggtttcagtgggatcatcactttactgtgtcctgttgttgccacctgaattggcaagcctggcagaatatcgtcctcagtgagatgaagcgcgttgataatcgccgcacgtgtttcaccttccagcggtggctcaaagcccggcgtaccttgttccaggctaatacgataatcatcgttgtgcttttcgatagtcacgcgatgttttcctgccaggcttgtttgccagatcgtgcaatttcctaaacctaacaccttcgcacgtacatagtgcgcagctactgtcgcgtgaccgcaaatcggcacttcaaccgttggcgtaaagtagcggatgcgcacatcgctgtcgtcgctgtgcagcagaaaagcagtttcgctatggcctaactcgcgggcgataagctgcatttgcgcttcgctaagattatcggcggggaaaacaacaccggcagaattgccgcgaaacggttgactggtaaaagcatcgacgtggtacacctgcggtttcattaacgttctcctgtgactggagaactatcatagcctgcaagtggccggagagcgaagggctatccggccagggtgaaattatcgccggctacgcacaatttgatatcgacgagtaaagtactcaaacggcgcgctccacacatgcaccagtcgggtgaacgggaagagcaggaagatggtcattcccaacaccagatgcaggcggaagacgaacgctacgccgttgagcatctcactgcttccaccacggaaagtgacaatgctttgcgcccaacccaccagcttcatcatttcgctaccatcaggatactgtgcactaaacggtatggtacttagccccaacagacactggatcagcaaaatgctcatgatgatgatatccggcgtagtggaagtggcacgcacgcgctgatttgtcagcctgcgccacagcagtcctgcgccgccaatcaacgtcaacacaccgcaaataccgccgagcaccatcgccatgagttgtttcgctgccactggcaaaaaccacgcgtacatccagtgcggcgttaacatgccgaacaagtgcccgaagaaaatccccaaaatgccgatatggaacagattgctccatatcaccatcccgcgtttatcgagcatttgactactggaggcgcgccaggtgtactgcccgtagtcgtagcgcagccagctgccgaggaaaaacaccgtcgcacaaatgtacgggtagatatcgtaaaaaaagacgttcagatactgaatcatttcccacctcccgcactgatgtcgacatattgcggcgcgacatcctggctaaagcgtcgctgatattgattaagcgggctgctgtcacacgccgtggcgttatcttcaataaacttcacctgttcctcttcccacactgcatcaagcgcctggcgggtgtcatcgcgctcttcgctgtttacttgttttgtgacactgtcactactaagggagcttcccgccagttgcagcagagcatcaaacaacgcgtaccacggtgcctcgcgttgttttaagcgaccgccaagcagggcgaggatcggcgcaacattgagcaatccttctttcgcctgatcgtcaggcagtacgcttaaatactccagatacagcggtagataatcgggcagttcccgacaatccagctgcaggccgaccttttcatactccgccagcaggtccaccattgcctggccgcgatcgcgggactcggcatgaacatgttcgaacagcagcaggctcgtggtgcgcccgcggtcaaacacttcgcaccattcggcctgtttatccagcagcggcgcgttaagcaggttgtgggtgaaatccgtaagcatcggcgcgtcgcggcggatcaacgccagcgcgtcctccttgcattcccacaacagctcgtccggatactccatcaacaggccgatcactttgaggatctgcattattcgccctccgctttgtcgcgcacttcggtgatgttgatggcatcgatacggctactgttgaacaggttgaatttactgtcgctaccgtggcaaccgtcgccaaaggtaaaaccgcagccgttgcgttctgcgaaggcatcgcccgccatttcccgatggctggtcgggataacaaaacgatcttcatagttggcaatggcgagatagcgatacatctcttcgacctgggcgacgctcaggcctacttcgtcgatggcacgagtatcagtaacgccttccacggtttgactacgcatatagtggcgcatcgccatcatccgtttcagcgcccgcagtaccggaccggtatcgccggcactcaacatattggcgagatattgcaccggaatacgcaggctttcgatggcgggcagcacgccttcgcttttcggcaaaccgcccgcatctgcgtaggactgaatcggactcagcggaggaacgtaccagaccatcggcagggtgcggtattcagggtgcaacggtagtgccagtttccagtccatcgccattttgtagactgggctacgctgggcagcgtcaatcacattttgtggaataccttgtttcagggcttcctcgatcacactgggatcgtgtggatcgaggaacacttcgcactggcgttcatagaggtcaacttcgcgctcggtgctcgccgcttcctcgatgcggtcggcgtcgtaaagcagcacgcccagataccggatgcgacccacgcaggtttcactgcacacggtcggttgaccggactcaattcgtgggtaacagaagatgcatttttcactcttgccgcttttccagttgaagtagatttttttgtacggacaaccgcttatgcacaaacgccagccacggcatttatcctgatcaatcagcacaatgccgtcttcttcgcgtttgtagatagcgccgcttgggcaggtcgccacgcagctgggattgaggcagtgttcgcacaggcgcggcaggtacatcatgaaggtgttttcaaactgcccgtacatctccttttgcatggcctcgaagttgcggtcgcgggcacgtttttcgaactcaccgcccagcagttcttcccagtttggcccccagatcactttgtccatccgtttgccgtcaatcagactacgcgggcgagcagtaggaatatgtttgccttccggtgcgctatgcaaatgttcgtagtcgaaggtgaaaggttcgtagtaatcatcaatctgcggcaccaccgggttggcgaagattttggttattacgcccatcttgttgcccagacgcgggcgtatcttgccattcacatcacgcacccagccgccttgccactcttcctgatcttcccagtttttcggataaccaatgcccggtttggtttcgacgttgttaaaccatgcgtactccatgccttcgcgcccggtccagacgtttttacaggtcacgctacaggtatggcagccgatacatttgtcgaggttaagcaccatgccgacttgactacggattttcattttttcgcctcctgtacctgatcgcgaccttcatcatccagccagttaacgttcttcatcttgcggatcatgatgaactcatcgcggttgcttccgacggtgccgtagtagttaaagccccaggccagctgcgcgtaaccgccaatcatatgcgttggtttcgggcaaacgcgggtaacgctgttatgaatgccgccgcgcatgccagttacttcgctaccaggaatattcataatgcgttcctgggcgtgatacatcatggtcatgcccggcggtacacgttggctgaccaccgcgcgggcagtcagcgcgccgttggcgttgaatacttccacccagtcgttatcgacaatggtcagttctcgggcatctgtttcgctgatccagacaatcggtccaccgcgagagagcgtcagcattagcaggttttcactgtaggtactgtgaatgccccatttctggtgcggcgtcaggaagttaagtgctttttccgggaagccgtttggcggtatctggcgcatctcactgacgctacgggtgtcgataggcgggcgataagccaccaggctttcaccaaaagcacgcatccacggatgatcctgatagagctgctggcgtccgctcagcgtgcgccacggaattaactcatgaacgttggtgtatcccgcgttataggagacgtgatcgctttccagaccggaccaggtggggctggagataattttacgcggctgcgcctgaatatcgcgaaagcgaatcttctcgtcctctttgtgcagcgccagatgggtatgttcgcgcccggtgatctcgcccagcgcctgccacgctttgactgcaacatgaccgttggtttccggtgccagtgccagaatcacttcactagcgtcaatggcggtgtcaatcagcggacgcccctgtgccgggccatcacgcttggtgtaattgagtttgccgaggaaatcgatttcatcctgggtattccagctaatccctttaccgccattgccaagtttgtccatcaatggcccgaggctggtaaagcgttcatacgtagcagggtagtcgcgctccaccgccacaatattcggcgcggttttgcctggaatcagatcgcattcgcctttgcgccagtcgagcacttcacacggctgactgagctctgccggagagtcatgcagtaggggttgtaataccacgtcggtttctttgccaagatgacccacgcacacttggctaaatgctttggcgatacctttgtagatttcccagtcgctgcgactttcccacgccggatcgaccgccgcagaaagcggatgaataaacggatgcatatcgctggtgttcatatcgtctttttcgtaccaggtggcggtgggcagaacgatatcggagaacaggcaggtactggacatgcggaagtcgagcgtcaccagcaggtcgagcttgccttcaatcgctgcagtttgccactcgacttcttccggtttgatcccgtcgctggcaccgagttcctcgccctgaatcccgctttcggtccccagcagatacttctgcatatactcgtggcctttgccggaggagccaagcaggttagagcgccagacaaacaaattacgcggatgattgctgctgctatctggttgttcgcaggccatacgtaaatcgccgcttttcagcgcctgggcggtaaattctgtgggggataatccggccttgtcggcttcagctttaatcccgagcgggttacgccccagctgcggcgcagaaggtagccagcccatacgttcggcgcgaacgttgaaatcaatcagatgaccgctgtacttactggcatcggcgagcggactaagtaactcctgagcagagactttttcatagcgccattggctggaatgattgtagaaaaagctggtgctgttcatttggcgcggtggtcggttccagtcgagcgcaaaggccagtggcaaccagccggtttgtgggcgcagtttttcctggccgacatagtgtgcccagccgccaccgctttgcccgacacaaccgcagaagatcagcatattgatcatcccgcggtagttcatgtccatgtgataccagtggttaacacctgcgccgaggataatcatgctgcgcccatgcgttttatgggcggtatcggcaaattcacgggcgatggtttcaatatactggcgcggcacgccggtaatttgctcaccccaggctggggtgtacggtttgatttcagcgtaatctttcgcactgttttcatcttccagcccgcgatcgaggccgtaattcgccagtaccaaatcataaacgctgaccaccggacaggtgttgccatcgactaacgtcaggtttttaacgggcaattggcgcaccagcaccggattgtgttttacgctgcgaaaatgcggattttcaatgccgccaaagtaggggaaggccacgcctgcaacagcgtcatgttgaccgagcagggttaagctcaattcggtttccgtaccggcggcaatggattccagattccatttgcctttttctccccagcggaaaccaatgctaccgttcggcactaccaattcacctgcggtattaactgctacggttttccactgcggattgttgctttcgcccagtccatccaccaggtcagatgcgcggatcatgcgcccgggaacgtagctaccatcgtcgcgaggctccagcattaccagcatcggcatgtcgctgtagcggcggcagtagttgataaagtagtcgctgggattatcgagatgaaactcttttaaaatcacatggcccattgccatcgccagggcgctatcagtgccttgtttcggtgccagccactggtcgcacaatttggccacttcagagtagtcaggggtaatggcgatggttttagtgcctttgtagcgtacttcggtaaagaagtgggcgtccggcgtacgtgtctgcggtacgttagacccccaggcgatgatgtagctggagttataccagtcggcagattccggtacgtcggtttgctcgccccaggtcatcgggctggcgggcggcaggtcgcaataccagtcgtagaaacttaaacaggtgccgccaagcaggctcagataacgcgttccggcggcgtaagaaaccatgctcatcgccgggatcgggctgaaaccggcaacgcgatccgggccgtaggttttgatggtccagacgttagcggcggcaatcagctggtttagttcctgccagttggagcggataaacccgccgcgcccacgcacttgtttgtagctcaggcacttttgcggatcgttcataatgcttgcccacgccagtaccggatcgctgtgttgcttgagggcttcgcgccacagttcaatcagtcgtttacgaatgagcgggtatttcaggcggttagcgctgtaaagataccaggagtaacttgcgccacgcgggcagccgcgaggttcatgattgggcaggtcagggcgagtgcgcgggtagtcggtctgttggatttcccaggtcaccagaccatttttaacgtagattttccagctacaggagcctgtacagttaacaccgtgggtggaacgcacgattttgtcgaactgccaacgctggcgatagctgtcctcccagtcgcggttgctatgcatcacctgtccgtgaccatcggcaaaggtttcgcccttttgtttgaagtagcgaaagcgatccaaaagtttactcatgacatgactcctgctccaggaatgaattgggatctgatgccttgtcggatgcgacacggttgtacatcaggcatcgatctcttatttttggctgaacttccgccgaccataaaccagccaggtcagcagcacacaaacgatgtagaagattaaaaacactttcatcgcgccgaccggagagccggtcatattgaggctcatgccaaacgcctgcggaataaaaaagccgcccactgcgccaatggcactgataaagcccagagccgccgccgtttcggtgacggcttcttcatgagcttgctcatcactaccgcctttcatctttacccgataaatggttatctggcgaaagatgacggcgatcatctggaaagtagaaccacttcccagacccgcagtcagaaacagccccataaatacggcgtaaaaggcgatgaaattaccggagcctgtgcccggtaaggtaaggaacagcagggcactgaaaatcgccataaaaataaagttgatcaacgtcacccgcacgccgccgaacttatcggaaatagcaccaccaacgctccgcgcgatggcaccgataaatgggccaaagaacgccaggcgcagaatattcacatccgggaactgggtttttgccagcatggcaaaacccgcagaaaaaccgataaagctaccgaaggtggcaaggtaaagcaggctcagcagccagagatgcaggcgttgtaagacagggagctggtcggcaatactggcgcgactactggcgatatcattcatcccactccatgcggcgatcgtggcaatcgccagtagcggtacccaaatccatgcggcattcgccaggctcatcacgctaccgtcggcctgcggtacgccattgacgccgagaaaggcaaatacaggtacaaaaatgaccagcggtgcaaccagctgcattacacttacacctaagtttcctaatccgccattaatcccaagagcgctcccttgtttggcttttggaaagaagaaactgatattgcccatgctgctagcaaagtttgcacctgcaaaaccgcatagcaaagcgataacgataaatatcccaaaaggagtattcggattttgcacggcaattccgagccagacgcaaggaataatcaggattgcagtactaaaaaccgtccatcggcgtccaccgaatataggcaccataaaggagtagggaacacgcaataatgcgccagaaacggagggtaatgcggttaataaaaagagttgatcggtagtaaaattaaaaccgattttattgagattaacggtaactgcgctaaatagcatccagacacagaaggcaagaagtagacaactgacacttatccagagatttcttcgagcaatatgttttcctttattttcccagaaggccggattttctggtttccagtcgcgcaaaagataacgactatttttctcattttgcagtgccatattgttcctcacatgcacacattggtaatgaaaaaaagacaaaacacgaggtaaggcgcaatagccagttattagaattaaggatgaattgggtgaagtgctgattgaaagaatagataagaaagcgtaaccgcgggggcagaatggggattaagtagccagatatgtgttactaaatgtaactaacaagctaaccttcaaacggggttaatctttgaacgtatgtcatgtttcaacccttcagatcgtgaatctaaagggttacatattaactatattatcaacaagaccagacacttatagaattagtgatgatttattcattaaaaaggccaactactggaggaaaagcttctgtccagaaggtctatcggttcctctcttattgcctgattgtaataatcgttattacagtaagtattgtttatttcatctaaggtcatgtttttaacttttatattcatctggtttacaacttcctctgtcttgtaagtgtgtatattatatggggtatatgcttttttaataggatagtgaaacaattcgttatccacatctattccgtcagagtgaacttcaaatgcaccagggctaagaattgccaggccagtattaagcttaagtgctggggaaaacaaattaaataacatgagctgcatagtagggcaattgttcttcccagaaacatttaaaaaatttaagttttgctctgttttattatggggaataaagttccaatatcggatgtattattagtatcaatgtgggttattttattattgtccagtcttaaacttttgatagatggaagataagtcaggaaatcaagatttatatatttcaactggttgttagcagcgtttaatgtctgaacattgcagaagttgctatagaatattttaatttcagaaagcaaattgttgttaataagtaacgtattcaagttgggaaataagtcattgtgtaaacttgttagtttattatgggatagatccagcagtaagagttcatttttattacctgcaacaatatcagttaattgattatggctgagattcaggtattgcagccattcgcaagattctaattgcacaaactctagttgattatgtgccgcactaaaataagtaacactactaagcctatctatatcaatatttctgagagcattattattcatagatatatgtgtaatacttacatttctgccttgaggaaaatttatactctcaagagcattactattcagacttagctttacgagtctatcgtagttggttgcatcaaaatgtgtgaattggttattatcaagattgatagatgtgaagttttgcagccctggtggttgagtggttaaattaagtccacttaaatcaatggtcacttcattagtgtcatcaattatatttcttactgcagtccagtactgcatttgtgcaagtggatcattgttgatgccgttaactaatacatgccaaagatgtttactacttattagttgatcaatgtcattggttggcagtaaattgttattgcttaagtttaaatattccagttttgtagtgtttttggcgtttaaatgtgcaatatggttgtcgtttaaagtgattgttttcatcctgggatgattgtgtaatataaggtcagtgatcatattgtgatgggcacttaactcaatcagagattcttgccgcggctgccgttggcttcatcgttatagcctttaaaatcatattcccagtgaccaaaaccaatcatttgatcattgatttgcgtttctcctttaaagccgagacgggcataagttttatcaccatcgtcacgcttatcatcagtaaaataacgtagagcggtaaccttgccataaaggtcgagtttattaccatccttgttatagacttcggcagcgtgtgctacgttcgcagctaacaaaccagttacaaccaccgcaactatttttaatttcatttaacagaatccttttaattatcgttaaacgtattttctaaacgaattttaaacggcgtcatttataaatgacatactgtttttaaaatagaatggtgattaaaaacaatgagaaaaatagatgaaataatattatttatcgatatgtgatcgaagtcgaaatgagatataaggtgaattactggtatttgaaatttatttttttaatattgtcggaatttatctgattaactaccgggccgtagacccggcagttattttaaccacgacgtgtcgccagccagcagagcagggaaccgccgcagaccatcagcgcgccttgccagaagctgaagctcagcggggcgctgagcagcacggctgcaagcgcactggaaagtacaggcgtaaaatagctacctaccgccataatggtgacattgccatgcaatataccgacattccatgcagcataagcaaatcctaaggtaaatgccgcagagatgagtttaatcatgacgggcgtgctaaatatcatttctggttgtggcgtaagaaaatagtaaacccacagacttgctcccgttagcaggacaaaaacggtaattccattaaatccgcgtgcgtatttattcgttactgtgcaataggctgcccagataaacgcaccaatgaacgccaggaaataactcaatgggctggtggtgatattattgatgatttcatcataatgtaacccattgtcaccgcctaacacccaacagacgccgacgagggctaataataatccaggtacaatcaaccagttggttttctgaccattaaacagaatggcaaagagaattgtcaggctgggccacagatagttcaccatacccacttcaatcgcctgatgatgggtcgccgcataccctaaggaaagcgccagacagatttcatagctgacgaataacagactcccggcgagtaaatagcctttcgggatttgccgaatacgcggaaatccaaccgtgaagattaacagcagcccgcttaaactatagatagcagctgcgccgccgaccgggccgagcccctcactgacaccgcgaatcaatcctaccatcgtgctccacaggacgatcgctatcagccctatgagcgttgctttttgtcgtgtcatgctcgctgttttgtctctcttgccgttaaaaattaagctgaattttatagcatttttttaactggcctgtcaggcagtggtgcgtttttctaccgctattgaggtaggtcaatttgcgaaggcggattattttgtggcaaacagatgttctttttgatttcgcgcaaaaagattcagaattttactgttagtttcctcgcgcagtaatacccctgaaaaaagaggaaagcaatggacgtcagtcgcagacaattttttaaaatctgcgcgggcggtatggctggaacaacagtagcggcattgggctttgccccgaagcaagcactggctcaggcgcgaaactacaaattattacgcgctaaagagatccgtaacacctgcacatactgttccgtaggttgcgggctattgatgtatagcctgggtgatggcgcaaaaaacgccagagaagcgatttatcacattgaaggtgacccggatcatccggtaagccgtggtgcgctgtgcccgaaaggggccggtttgctggattacgtcaacagtgaaaaccgtctgcgctacccggaatatcgtgcgccaggttctgacaaatggcagcgcattagctgggaagaagcattctcccgtattgcgaagctgatgaaagctgaccgtgacgctaactttattgaaaagaacgagcagggcgtaacggtaaaccgttggctttctaccggtatgctgtgtgcctccggtgccagcaacgaaaccgggatgctgacccagaaatttgcccgctccctcgggatgctggcggtagacaaccaggcgcgcgtctgacacggaccaacggtagcaagtcttgctccaacatttggtcgcggtgcgatgaccaaccactgggtggatatcaaaaacgctaacgtcgtgatggtgatgggcggtaacgctgctgaagcgcatcccgtcggtttccgctgggcgatggaagcgaaaaacaacaacgacgcaaccttgatcgttgtcgatccccgttttacgcgtaccgcttctgtggcggatatttacgcgcctattcgttccggtacggacattacgttcctgtctggcgttttgcgctacctgatcgaaaacaacaaaatcaacgccgaatacgttaagcattacaccaacgccagcctgctggtgcgtgatgattttgctttcgaagacggtctgttcagcggctacgacgctgaaaaacgtcaatacgataaaagctcctggaactatcagctcgatgaaaacggctatgcgaaacgcgatgaaacactgactcatccgcgctgtgtgtggaacctgctgaaagagcacgtttcccgctacacgccggacgtcgttgaaaacatctgcggtacgccaaaagccgacttcctgaaagtgtgtgaagtgctggcctccaccagcgcaccggatcgcacaaccaccttcctgtacgcgctgggctggacgcagcacactgtgggtgcgcagaacatccgtactatggcgatgatccagttgctgctcggtaacatgggtatggccggtggcggcgtgaacgcattgcgtggtcactccaacattcagggcttgactgacttaggcctgctctctaccagcctgccaggttatctgacgctgccgagtgaaaaacaggttgatttgcagagctatctggaagcgaacacgccgaaagcgacgctggctgatcaggtgaactactggagcaactatccgaagttcttcgttagcctgatgaaatctttctatggcgatgccgcgcagaaagagaacaactggggctatgactggctgccgaagtgggaccagacctacgacgtcatcaagtatttcaacatgatggatgaaggcaaagtcaccggttatttctgccagggctttaacccggttgcgtccttcccggacaaaaacaaagtggtgagctgcctgagcaagctgaagtacatggtggttatcgatccgctggtgactgaaacctctaccttctggcagaaccacggtgagagcaacgatgtcgatccggcgtctattcagactgaagtattccgtctgcctagcacctgctttgctgaagaagatggttctatcgctaactccggtcgctggttgcagtggcactggaaaggtcaggacgcgccgggcgaagcgcgtaacgacggtgaaattctggcgggtatctaccatcatctgcgcgagctgtaccagtccgaaggtggtaaaggcgtagaaccgctgatgaagatgagctggaactacaagcagccgcacgaaccgcaatctgacgaagtggctaaagagaacaacggctacgcgctggaagatctctatgacgctaatggcgtgcttattgcgaagaaaggtcagttgctgagtagctttgcgcatctgcgtgatgacggtacaaccgcatcttcttgctggatctacaccggtagctggacagagcagggcaaccagatggctaaccgcgataactccgacccgtccggtctggggaatacgctgggatgggcctgggcgtggccgctcaaccgtcgcgtgctgtacaaccgtgctagcgcggatatcaacggtaaaccgtgggatccgaaacggatgctgatccagtggaacggcagcaagtggacgggtaacgatattcctgacttcggcaatgccgcaccgggtacgccaaccgggccgtttatcatgcagccggaagggatgggacgcctgtttgccatcaacaaaatggcggaaggtccgttcccggaacactacgagccgattgaaacgccgctgggcactaacccgctgcatccgaacgtggtgtctaacccggttgttcgtctgtatgaacaagacgcgctgcggatgggtaaaaaagagcagttcccgtatgtgggtacgacctatcgtctgaccgagcacttccacacctggaccaagcacgcattgctcaacgcaattgctcagccggaacagtttgtggaaatcagcgaaacgctggcggcggcgaaaggcattaataatggcgatcgtgtcactgtctccagcaagcgtggctttatccgcgcggtggctgtggtaacgcgtcgtctgaaaccgctgaatgtaaatggtcagcaggttgaaacggtgggtattccaatccactggggctttgagggtgtcgcgcgtaaaggttatatcgctaacactctgacgccgaatgtcggtgatgcaaacagccaaacgccggaatataaagcgttcttagtcaacatcgagaaggcgtaagggggcgaacagatggctatggaaacgcaggacattatcaaaaggtccgcaactaactccatcacgccgccttctcaggtgcgtgattacaaagcagaagtcgcaaaacttatcgacgtttccacctgtatcggctgtaaagcctgtcaggtggcgtgtagcgagtggaacgacatccgtgatgaagtggggcactgcgtcggggtttacgataaccccgccgatctgagcgccaagtcctggacggtgatgcgctttagcgaaaccgaacagaacggcaagctggagtggctgatccgtaaagacggctgtatgcactgtgaagatcccggctgcctgaaggcgtgcccgtctgctggtgcaatcattcagtacgctaacgggattgtcgatttccagagcgaaaactgcatcggctgtggttactgcattgccgggtgtccgtttaatattccgcgcctcaacaaagaggataaccgggtatataaatgcacgctctgcgtcgatcgcgtcagcgtcggccaggaaccggcttgtgtgaaaacctgtccgaccggggctatccacttcggcaccaagaaggagatgctggagctggcggaacagcgcgtggcgaaactgaaagcgcgtggttacgaacatgctggcgtctacaacccggaaggggtcggtggtacgcacgttatgtacgtgctgcatcacgccgatcagccggagctgtatcacggtctgccgaaagatccgaagatcgacaccagcgtaagcctgtggaaaggcgcgttgaaaccgctggcagcggctggctttattgccacttttgccgggttgattttccactacatcggtattggcccgaataaggaagtggacgatgacgaggaggatcatcatgagtaagagcaaaatgattgtgcgcaccaaatttattgatcgcgcctgtcactggaccgtggtgatttgcttcttcctggtggcgctgtccgggattagcttcttcttcccgacgctgcaatggctgacgcaaaccttcggtacgccgcagatgggacgcattttgcacccgttcttcggcattgcgattttcgtcgcactgatgtttatgtttgtgcgttttgtgcatcacaacatcccggataagaaagatattccgtggctgttgaacattgtcgaagtattgaaaggcaatgagcataaagtggcggatgtcggtaagtacaacgccgggcaaaagatgatgttctggagcatcatgagcatgattttcgtgctgctggtgaccggggtgattatctggcgtccgtactttgcgcagtacttcccgatgcaggttgttcgctacagcctgctgatccacgcggctgcgggtatcatcctgatccacgccatcctgatccatatgtatatggcattttgggtgaaaggaagcattaaagggatgatcgaagggaaggtaagtcgtcgctgggcgaagaaacaccatccgcgctggtatcgtgaaatcgagaaggcagaagcgaaaaaagagagtgaagaagggatataatctcttttgaactttaagctgaaaatggcgctgtaaaaggcgccattttcatattgtagacaacgtaggctttgttcatgccggatgcggcgtgaacgccttatccggcatgaaaacccttcaaatccaatagattgcagtgaacgtgtaggcctgataagcgtagcgcatcaggcaatgttgcgtttgtcatcagtttcaaatggcgctgtaaaaggcgtcattttcatattgtagacaacgtaggctttgttcatgccggatgcggcgtgaacgccttatccggcatgaaaacccttcaaatccaatagattgcagtgaacgtgtaggcctgataagcgtagcgcatcaggcaatgttgcgtttgtcatcagttctaaatggcgctttataaagtgccatttttttattgcgtaaccagacggcgtaatcggctcacatccactgttttttctgcctctgccagactccaggcgttttgcagattcagccacatttgcgggctactgccgatcaccacggaaagtttaatcgccatttctggcgtcaaagctgcttttcctgtcagcaatcggcttgccgtactgggagcaatttccattgctctggcaaactcgcgcaggctgacattaagttcgtccagactttcctgaataatgtcccccgggcggggatgattggccattttcattagtgtctttactctcagtagcgttccttcactgggaacactatcattattgttccttcctacgcaacaataatccatttagccatttcatgttggagagtgtgcgatgctgcgacccgaacatggcagtcgcagcaaaggcctcttagtgacggaaatcaatcaccatgcggccacggattttgccttcttccatctcagtaaagatggtgttgatgtccgctaacggacgcagggcgactttcggcaccactttaccttcggcggcaaactggaaggcttcagttaaatcctggcgcgtgccgaccaggctaccgaccacttcaataccatccagcacaagacgtgggatatccaggctcatagactccggcggtagaccgacagccacaacacgaccgcctgcacggacagcatcaactgcgctgttaaacgcagctttagctaccgctgttaccaccgcagcgtgagcgccaccagttttctcctgcacaattttggcggcgtcttcggtgtgactgttaatcgctaaatctgcgcccatttcggttgccagttttaactgctcatcattgacatcaatggcgatcactttggcgttaaagacattcttcgcgtattgcagggcgaggttacccagaccgccaagaccgtagatagcaatccactgccctggacgaattttactcagcttaacggctttgtaggtggtgactcccgcacaggtaatgctgctggccgccgcgctgtccagaccatctggcacttttaccgcgtaatcggcgaccacgatgcactcttccgccatcccgccatcaacgctgtatccggcatttttaacactacggcagagcgtttcgttaccactgttacagtattcgcaatgaccgcatccttcgtagaaccacgccacgctggcacgatcgcctggttttaaactggtgacacctggacccacttctgccaccacaccgatgccttcatggcccagaattacgccggttttgtcaccaaaatcgccattcttaacatgaagatcggtatgacatacaccacaacactccattttcagcagggcttcgccatgtttcagactgcgcagtgttttatacgtaacgtcaacatgatgatccttcgtaacaactgcagccttcatagttcctccttttcggatgatgttctgcatagcaggtgaggcaaatgagatttattcgccactacccagtatggatgagatctgaaaaagggagagggaaatagcccggtagccttcactaccgggcgcaggcttagatggaggtacggcggtagtcgcggtattcggcttgccagaaattatcgtcaatggcctgttgcagggcttcggcagaggttttcaccgccacgccttgctgctgcgccattttgccaaccgcaaacgcaattgcgcgggagactttctgaatatctttcagttccggcagtaccataccttcgccgttcagcaccaatggactatactgcgccagcgtttcacttgcgctcatcagcatctcatcggtgatacgactcgcgccggaagcaataacacccaggccgatgcccgggaaaataaaggcgttgttacactgggcgatagggtagattttatctttccataccactggattaaacgggctgcccgtggcgaccagcgcgttaccttcggtccaggcgataatgtcctgcggtgtggcttccacgcgactcgtcgggttagacagcggcatcacgatcggacgcggacagtgtttatgcatctcacggatgatctcttccgtaaacagcccggtctgtccactgacgccaatcagaatatctggttttacattgcgcaccacatccagcagactcagcacatcgctgtcggtatcccagtcactgaggttttcgcgcttctgcaccagtttggtctggaaaggcagcaggttcggcatcttgtcagtcagcaagccaaagcgatcgaccataaagactttctgccgcgccgcttcctcgcttaatccttcgcgctgggtctgggagatgatcatttcggcaatgccgcatcccgcactacctgcgccaaggaagacgatttttttctcgcttaactgaccacctgccgcgcggcttgctgcgatcagtgtgccgactgttaccgccgcagtgccctgaatgtcatcgttaaaagaacaaatttcattgcgatagcggttaagtaacggcatcgcatttttttgagcaaagtcttcaaactgcaacagcacgtctggccagcgttgtttcacagcctggataaattcatcaacgaattcatagtattcgtcgtcagtgatacgcggattacgccagcccatatacagcggatcgttaagcagctgttggttgttcgttccgacatccagcaccaccggaagggtatacgccgggctgatgccgccacaggcggtatagaggctcagtttaccgatcggaatgcccatcccgccgatgccctggtcaccaagccccagaatgcgttcaccgtcagtcaccacaatcactttaatattatggttcggcacgttttgcagaatatcgtccatattgtgccggttctggtaagagataaacacgccgcgactacggcggtagatctcagaaaaacgctcacaggctgcgccgacggttggggtataaataacaggcatcatctcatcaagatgattgtttaccagacggtagaagagggtttcgttagtgtcctggatgttacgcaggtagatgtgtttgtcgatttcggttttgaatccctgatactggatccatgctcgttccgcttgttcttcgatggtttcgaccacttccggcagtaaccccagcaggttgaagttacggcgttcttccatgctgaaggcactgcctttattcaacaacggaaattccagcagtacagggccagcgtaagggatataaaggctacgctgtttttttgtttttggttccatgtcactcactcttttttgaatatccatccctggggggcttttatcgtctttgctttaccgccagggcgtcggcctcaagtataaagcagataaaaacaaaaacaccattgcgcaggcaatggtgtttaatcgtcattgaggactgatggttatgaattacttttcagcggggcgttttctgccggttgggttatttactacgctggatttgtcaccttcggtaactattttgcgctggttagaaattttatggtccagtccaagaatatgacgtgcctgacggttgcttttcattttaactcctcaatcctgtagctagttttaaggacaacatcgccgtagcgaagaaacacgtgctaaacccctaaattaggttgccgatcaagcatagcaccttaaagcgtagggtgctggccactgaccacataattgatcgtttgctggtagatatcactgaggatgtcgttatcagaagcttcaacccatttggtcagctccatgagaatgtcatcttcagtgacaacaccatgctgtgcccgaaggccttgctcaatggcattaaccagagcgggttctgctgtactattttctgcctgataataagtaaacatagtgattctccgtgtctgtgtatttatggtgtctgctacggatcgcagatttataaagcacattcagcatggcaaatatttgccgcttcgttgttaagattagtcctggttgatgatttttatattttaacaccatgatattcatagggattgtgattggtatgatccgattaatattgatacaatatcttttgggttatatattcccggtaatctattgtgggaatttaatttaagtgcagaagtaatattttcgccggattttattcggaatatcctgcttatcctcgtgctgtttctcacgtagtctataatttcctttttaagcccacaggagagcaacaatgacaatccataagaaaggtcaggcacactgggaaggcgatatcaaacgcgggaagggaacagtatccaccgagagtggcgtgctgaaccaacagccgtatggatttaacacgcgttttgaaggcgaaaaaggaaccaaccctgaagaactgattggcgcagcgcatgccgcatgtttcagtatggcgcttagtttaatgctgggggaagcgggattcacgccaacaagcattgataccaccgccgatgtgagcctggataaagtggatgccggttttgcgattacgaaaatcgcactgaagagtgaagttgcggtgccgggtattgatgcctctacctttgacggcataatccagaaagcaaaagcaggatgcccggtctctcaggtactgaaagcggaaattacgctggattaccagttgaaaagctaaagcattgccggatgacgcgtcaggcgcgtgaatgcctgatgcgttgttagcatctttacagcgcccgccagcaccggagctcacgtccgtcctcccttattgctaaactttgccggacttcacatccgtgggttgccagcgggcaacgttcgtagaaaaaacagccttgcggcaacgtgcggtttcccggcagatccgttttacgtaatgcccattcttcctccagcggtttatcaatggcggggagggaatccagcaataatcgggtgtatggatgtgcaggtgccgtcagcacctgctgcgcgtcgcccagttctacaatctgcccgagatacatcaccgccacccgatcgctcatatgacgtatcacgctgacattgtgactaatcagcacataggtcagcccgtgattttcctgtagcgttaccagtaaattgaggatctgcgcctgaacggagatatccagcgcagaggttggctcatcaagcacaatcacgtcaggctggctagagagtgctctggcaatggcgatacgttgccgctgcccgccggagaacgcatgaggcaggcggtcgagatactccggacgaatacccacctgcacagccaactcctctgccaacgctcgccgctgttgttcactactacgcttagctatccagagcggttctgtgatgatgcgccacaccggtaagcgcggattaaggctagagagcgggtcctgaaacaccatctgcataatgcgttgactgccagaacggatgtactgcccgtggctcggttgcagcatacccattaaaagctgtgcgagggtgcttttgccgcagccactctcgccgacgatccctaaggtttcaccacggcggatctgtaaatcaataccattaatggcatgaacatgttccgtagttttaccaagccagtttttacgggccgggaaattgatatggacgtcgcgtaacgttaataacgtgtcagacacttataacctcctgctgcggataccaacaggcacagcgctggttgttgtcaccacacgctgtcagcgccgggacgttttcacactgtgcacctgccgcatagcaacgatcgcgaaaagcgcagccgtcaggcaaatgggtgaggtttggtaccgtccctggaatggcgggtaatagctggcgtggtactccatgttctggtgcgcattgcagcaaaccaatggtatacggatgccggggatgatggataacgtctgccgtcacgccgctttcaattacgcttccggcatacatcacgtaaacgctatcgcacagttggctcaccacggccatatcatggctgatgaacagaaccgcagttccactggcgcgggctttatgtttaagcaaacgcagtacctgcaactgcaccgtgacgtccagcgccgtagtcggttcgtcggcaataatcaattgcggctcgcaggagaatgccagcgcaatcattacccgctggcgcataccaccactaagctcaaacggatagcggctcataacttccacggcatccgggatttgcatctcttccagcaggtcaatcgctttagctctggcttcccgacgacttattggttgatgatggcggatcacgtccatcatctgaagacctattcgacgtgtcggattgaggtcggtcatcggttcctgaaagatcatcgccactcgtgcgccgcgccactgacgaagctgtttttcccgcgcgttaagaacatcttctcccagcagggaaatctgcccccgatgtacgcaataactgcccgtcggtagcagacgcataatcagcattgcggtgacacttttaccactgccggattctcccaccagaccgacaatttcaccgcggttaatctgcaaggacacattgttgagcgcgtgaacatcaccgttaaaaccggggaaactcaaatgcagttgttgaatgtccagaacgggttgggtcatgactgctttcctcctgctttttagttcaactctgctttcctcctgctttcgggtcaagcagatcgcgaataccatcaccaaagagattaaacccgacggcggtaagcaaaatcgctgcccccggaaatgcgcaataccaccactgatcgagtacatagttgcgaccatttgctaccatcgcgccccattcagcactcggttgttgagcacccaggccaataaatcccaacgtggcggccattaaaatcgcgctaccgatatccaggcttgcctgcacgatcagcggcggtagggagttacgtaaaatatgccagttgatcagatgccaacgagacgcgccaaaggttttcgccgcctgaacataggtatactggcgtacaactaatgcttgcccccgcgccaggcgcacataaaagggaattcgcacaatagcaatagccagcatggcgttaaacaaactcggcccgagagcggcagccagtgccattgtcagtaccaagctaggaatgctcagcataatgtccatgatgcgcatgatgatggcgtctgcgcgtccaccaagcacaccggatagacatccgagtaggctaccaatcatacccgcaatggcaaccacgactaatccggcgagaatactttgctgactgccgaccagtacgcggctaaacagatcgcgtcccacttcatcggtgccaaaccagtgcgccgcagaaggcggcaaaaggcgggcggttaaatcaatggcgttgggatcatgcgtcgccagccacggactaaaaatcatcatcaatagcattaatacaatgatgactgcgctggtcacggtgagcggactgcctttcagcatccataccagttttgcaccgttaaatcgcgtttgtttttgtgggcgtacggcggacgtttcctcgcttagcatcattcaccacctccacgtccgatacgcggatcaatccacaaatagagcaaatccaccaccaggttgaccagcacataagcaaaactaaccacgacggcaaagcccatcactgccgggaagtcgagcgcctgtatacttgttactacccatgcacccattccgggccaggcaaaaacggtttcggtgagcactgcgccatacaacaaatcgcccagcgccaaacccaatacggtaatgcttgggatcaacgcattgggtagcgcataacataaaacgatataccagccgggcaagccgctggcccgggcggtacgaatgtagtcttcactcaattgttccagcatcgcactgcggatctggcgagcgacaattcccaggtgaacgaacgccagcgttaatgccggtaagatgagatgttgcaacgcattgaagaagacttcaccgttgccttcaagcagcgcatcgagcagataaaagccggtaacgtgcgttggtggatccagccagtcatcaagccttccgccgccgggaagaatttgcagatgaccataaaacagcacaatgacgcccagcccaagccagaacgcaggtgtggagattccggtaatggccattattcgcaccagatgatccagccagcgatttcgccagactgcagagagtatgcccagcgggatgccaatcaggagtgccagcagcagggcaccaaaagccagctccagcgtcgccgggaaaaatatacgcaactcttccagcaccggacgcccggtacgaatggatgttcccaggtcaccatgaaacaggtcgctgacgtagcggtaaaactgtacatacagtggctggtccagtcccagttgctggcgaatattttccacgatagcatcgctggcgcggtcacccgccagtaaccgcgccggatcaccagggatcagatggctgataataaacgtaatcacgcagacgcccgccaccacgagcaccagcccccagcagcgttggcgtaaaatactccagaaggtcacgttatttactcatggtattgatattgaagacctgttccagcatgggattgaacacaaagcctttcacctctttgttcatcgccagttggtagtttttctggaacaggtacacataagcagcgtcatcaatgacgattttctgtgcctgctggtagtcccgggtacgctgcgtctggtcggtggtcgcaagcgcattgcgcagtaacttatcgacctcactgttttcatagaagctgcggttacccggcagaccttttttgtcactctcaaaccagtaattcataaacatatacgggtcggcaaaatccggactccagttgccaatcgcaatgtcgtaatcacctttacccactctgtcgcgcatggtggcgttcgccagcttttccagcttcacaatgatgcccagcttgttgagactggattgtgtcgccagagcaataggctcccagttcggatcgttatcggagtagagaaacgtcaggctggtgggtttgctcgtcactttatcccattcggctttggctttcgtttcgtcatggttgtattgcattgccgtcgcatcgtagccccacatgccttccggaatcgggccgcgcatctgttttccgttaccactcagaatgccgttaaccatgccctgataatcggtagaccaggaaatggcccgacgcagatccgcctgattaagaggcgctttgctgttattcagatacagataggtaacgcgcagactcggatactctgccacattgactttattttcctgcttcagggcgttgagttgatccaccggcagcgcatcggcaatgtcaatgtcgccacgggagagctgcaggcgacgggaggcactttcaccaataatttttacgcttacccgtttgaagttcggtttattgcctgggtaatgcggatttggcaccagaactaattgctgacctttttgccagcttttcagcataaatggtccggaaccggcggtattttgcgcgaggaagccgcgagcatcatccgctgcatgttcctttaagaccgccggattgataatggatgcaccgtcattcgccagcgtgtagaggaacggtgcgaatggttggctaagggtaaacttcaccgtatgttcgtcgggagcatcaatctttaaatctttgggaaatgcttctgctggcccctggccgatttttagtagccgctcaaaagaaagttttactgcttcggcagtgacaggtgtgccatcggcaaatttagcattatctttcagggtgaacgtccactctttttgatcgtcagacgctttccagctacttgccagatcgccttcaacgtcggtactgcctttatcaccgtccgttttgtactgaaccagccgctgataagacgggtaggtcactgtccagtcgttattatctattgttaccgccgggtcgagggtttgtggatcggcggccttaccaatcaccagcatatcttttggtacggcggcgtgcgcaaccgggaaatttgtggcaaggacgagcgcgagcaatgtgggacgaaagcttatgcttctcttcatgacagtttcctgattaactgacgtgctgtgtgccaggggatataaaacaagagaattgatcagcgagcagagggtaactcgctgcctggggtaattcgaagtgccaccattcgctggagataccgacaaaaccgccaccagtcattatcgcattcagcaacagccgattgcgctgagcggcgggcgggacggaagggtgataggcatgggagcgctcgtgcatttcatcgaaccctgcgcccatatcgaggatgttcccgtgctcatcacgaagcgtcaggtcgatcgccgtgccacggctgtgattagaaccgaccgtcacatcaacaacatattgcgggtctgggcaggcttgccacaacatcgcctgtgcttgttgtgggcgatacgcatcgtaaatcaccagttgtaacccactcagctgggcgatgctgatacttttcgccagcgcggtaatcgcatccttgtgtaacagacaacgcgcttgctgataaatagctttacctgtgatgttatcagcgcaggcgtatttcaattcgatctccagatcagggaagattacggctaaatcaaccagttcggtggtatcgctcataaacggttcctgtataagacaaaaattgctgcgctttccgcttatgcagatctcatgccatgccgggataagcgccagaatgctggcttaaagttatattttttaacttttgatcaacatttgtgcagcgtagtgcagttttggtgcaagaggggaagttaaggaaggaatctcccggaatcgtagctgaaatcacagtatttaagtgacagtgtcacgttaaatgaaaacccgcgagtgcgggcgagaggaatttgtcagattttcagcggtaacacgctgctcatccagcctggaatttcttcggcgggtagggggcgggaaaagaaatatccctgaataacgcgacagtggatcttgcgtagcatctcaaattgctctttggtttcgacgccttccgccacgacggttaaattgaggctttgcccaatgctggtaatggcttcaagtaaggcaaggatgcgtttttcggtcagacaacgatcgacaaaacttttgtcaattttgatttccgttaccggaagactgactaagcgggataatccggaaaagcccgtaccaaaatcatctacgcttaagcccacgcccatatcacgcaggatctgaatgcgcttaaagatttcggtatcgtgttccatcatcatgctttccgtgatttctaccgtcagctggtggccgtcaataccccaggcgtgcattgcatcagacacctgattaggcagttgattactgcgaaagtgcagcgcgctcaagttcacggataacgccgggatatgaatattctggctacgccattctgctaactgacggcaagcttccgcgatgacccagcgcccaatattttcgatttcaccaatctcttctgcgagaggaataaaccgactagggggcacatgaccatgcaggggatcgtgccagcgagcaagggcttcgatgccgtacagttcacccgtttctgcgaagatttgcggctggtaaaccagtttcagttggttattgctaatcgcttctttcagcgctgcgcctaaaaccaaacgctcttttaccatttcgttcatcgccgggctgaagaactgccagccgttaccgccattcttgcgaatataatccattgcattgtgagcagtggagagcaagtaatcgcggtttttacccaggtcgtagctgatgccaatactcaaggtaagcgggaagggtttatcgtcaatcattatcggcttgctgaccacattccgtagctcatcggcgatttgggtaatgttactgacgtcgttttcgaggctcacgaggacaaactgcgtaccttcgatacgacagagatactgatccggtttgagtttttcacgaaagcgattgaccacttccagcaatgcctgatcggcccacgcatagccaaggctatcaatcacatcctgaatatggtcaacaccgatgagatacaccacgggagagacggctttgtcgaccaggtcatcgaggtaattgtgcaggttattgcgatttggcagaccggtcatcggatcaaattggatgagttgttcaatatgctgacggcttttttcctgttccagcgccagcgcggccatatgctggctgatatctgccacgcgttcgataaaggcgctggtttctgctccactgctggttttaatttgcaggatccccgcaggcgcgccatcacgctgacgaatggtcgcactccagctttgcgcattttgaatttctgcaccgtgggaagaactcgcccagtgtatcggcatcccgttgcgcagtgcgaacaggctaacatggctttcgttgagtacagattcgatgttacgacaaatgatttcccccatttcatgaaatggcgggctgctgcacatggcggcgagaatattgccttcaagctggcgaatctgccgttcttcggtgatatcgctgaaagtcattaccaggttctgcagatgcgcgagcacgtcataaaccgggctgatagaggctttaatccagattttttcaccggtgcgcgtcaacagcagaaattcgtcctgatcgcgggcggttttccatagcaactgttgtaaacgaatgcggttatcggcagggaattcaggaatgttcaggagtgtatcgggctgcataccgctggcttcgctaatgcagtaaccaaacatttcggtaaatgcgcgattgcactgcacaatatggcgttccggatcgaggacaatcaccggtcggtcgagatggtcaacggcaataatcaattgtcgggtctgttctttttgcgccatttctacgctggcatcccgtaccagcgccaggtaataaactttcccctcggcgctcactttgcttagcgcaaaacgggtccagattttactgccgtcttttttctccagctgcagctcccgactcatcccctcaacacgcgctttaccgccttcacggttgtgacgaatgtattcaggatgcgcaggacgcaaatcccgcggaatcagcatatcaatgttattgccaatgacttcttcacgtttgtatccccagagcttctctgcggcggggttgaaaaacatcacttcatcattttcgttaattaacaccgcacccatcatattttgctcaagggcggggaaaaaaatgccatcggcggcattatccgcatcggttagcttcatgattacctctgcatcctggcgcatttaaagactggctttccagagttcaacacggtttctacctcgtcttttggcgatatacagagcttcatcggctatttgaatgaggcgctcatagtcaggatgaccattaaacatggcggcaccgatggaaagactgagggcaatatcttcgccgtttgcggctttcagtttggttttctccacccgactgcgaatacgttctgcggtacgtaacgtttcgttttcagaagcttcagtcaaaacaatgataaattcatcgcccccgtagcggaaaacataatcactactgcggacgttgtcataaaaggcctgagagactttacgcagaatttcatcaccagtgttatggccccacgtatcgttgatctctttgaatttatcaacgtcaataatcagcacactcagcggtgtaccggtccggttggcatgggcaatttcgcgtttgaagatagtcggtaggaaacggcggttaagtaatttcgtcagtacatccataccgacttcgtggcggcttacttcttcaaacaattcacgcagcaaggtaataatttggcttacggtatttcttatctgtaataaaaatttcacccgcagacttctgttattcaaatttctggtgttacgcatggtttgattgaaaataccgtcgaaatcctgaatcagacgggagatatggcctacttcggcaataccactaaaataatgtcgacctttatggttaaaccacaggccaaaatcagcctggcttaaaggcaaactactgcctaaatcagaatccagcaggattttatagataatatctatttcccaactaagtatactggctatttgccgttctttttcttcttcggcgttttccagtaagctgaagatacgatagttttcatcttccttactggcactactgtcactaaaggtaaacgcgcgagtcatcacttccatcgcgatatcaatactgttaatgctgaaatggtagacctgaagtttttctgcggcggaataatcgctagagaagatcaccggatagaggatttttttcagcacccgaaaccccatctcgacaatttctaccggaattcctatgcgggcatgcacttccgcgacggtatgctggatttgtattagcctttcgacatcgtcaacctgggcagaaagcacgttaataatccagcgttccatcgcactcttcaactgccgctcaacttgttcattactcaagaattcttcggcatgcgggtcgatgcggacaattcgataaaactcgatactcagataatgagcatgcgcaacggcaatttccgcggctttagcacgaatgggcggatctgcctgttcgacaagtccggtccactcatctttcattcttttaaaatacatctccataattcacacccttataaggctgggaaatcagacggaatcaaaatgaaacgcaacgtgcgagatcgactaactgcaccatattctcctgaaatatgaagatatactgaaaagaaataagcgatttaggacagtttcaatctacgctactgttcttcagaagagtatagcccatcgtaattatttttcggtgacagcgaatatcgtatggtttttcatattcatacatttttattagggatttatggctgtttaactaagtgtggttaatttgacttaagtaagcatgattattagtgggatagtttaagagggtaacaagccggtgggtaaagcaccggcttgttacaaagtaagaatgggagtttaactgccccagcgactttgcagatagctgaccgcttgttgagtctgcggtttattcagatagtcctcacggaacaagatggtgccgctaatttcgggcacagcatcgttaagatcgagctgctttttcagttccggtacgccgccgttaatcatccagtctggctctatcttactaggttcacccactttatagaaggcgataccgatatacaggcgggtcctggtcggtttaacgacatccgcccaccattttgccaacacgtcataacgcgcggcactccgactgaacggccagtaaatttggggagcaatgtaatccagcaatccttgttccacccatcgacgggtgtcagcgtaggattcgtcataggctgccgcgcctcgggtatcggaaccgagcggatcgtgacttcggttacgccacacgcctgccgggctaacaccaaattcgactcccggcttaatgcttttaatggtgtggcttacctttgcaattaactgctgagtattgttgcgccgccagtctgctttactcgcaaatgcgcctccgtatttacggtacgtttcgttatcatttagccgactacccggactctccgtatagaaatagtcgtcaaactgcacgccatctacgggatagcgggaaaccacttctgcgactatacttgtgatccagtcctgaacctcagggatgcccgggtcgaggacaaagcgatcgccagacgttctgatccagtcgcggtgttgcacatagacgctcgccggttgttgagacagagtgctattcagttccctgatagtaccgggcttcgtattaacgcttacgcgataggggttaaaccaggcgtgtactttcatcccacgcttgtgggcttcgtcgagcataaattgcagcggatcgtaacccggattttcaccaatcttaccggtcataagatcggaccacggcaaaattttgcttggccacagggcggtaccgtccggcttgacctggaaaaagaccgtgtttatgccgagacgttgcagatgatccagtttgtcgatcatcgcctgttgttgtacacgggcccggctggtggggttactaatgttaacgctggaaaccggtggccagtcgagccgagaaaccgtggccagccagatgccacgcatcggttgactgctttgttgcgtcgtggctggtggcttactacctgctggtggtgtcaccatggactctggaggcgtgcttttacaactacacagtaaaagtgccagtgcaactagtatcgctggtcttctaatcgttaatttcttgtttcgggagcagatatccatatgtgctggtttccggtaaacagatgtgcgctcattctcgtacttatccccgttaagtcaatacgacagcaagcacgaaaaagggagcgatgaattatcgctcccttgtcttataaccattcagacatggttagtgtttcttgtcattcatcacaatatagtgtggactacgtgcacgcgggtgcaggaagaagtgaccttttggtgcgttctgactgttgattggctccagagtgacgccggtatttgctttgcctttacgatcatgaacagcatagagaataaagggcagggcaagtaccaccaggaaactaacaaccagtaattcaacatacatatcggtagaatcaccctggatgttatccggcggcaggaaggaaacaataaacgccataatactagtcagcagaccgacaattgccacgaccagtttcacccctttaccaccagggatattaaatgtgcgttttaagtcaggatgtttaagaaccaacacaatgtagccaataaacagcatgaaataagcacacagataaatcaccaccgtcagcgccagtgcgatcaggaaggacatgttgttaccgccaccggtattggtgaggatgatcaacgcgatagacgtaatcaccagctggctaatgaccagcgttaccggtacgccatttttgttcattttagcgaatgccgctggcagcaggtttttctgcgctgttacatacatcccgcgagaaggaccaacaatccaggaggcgatttccgccagaacacccagcaacagcagtgcggagatcacgcgaaccgtccactcaatttctggtgccacatgggacatcagaacggtaaaggtttgcattacccctgcggagaggttgatttcattacccggaatgaccatcgcaatagacaaaccaccaacagagcttaagcagattgccgccaccatcagcagtaacatagccaacggatagtcgcgccctgggttgctcatttcattgacgtgggttgcggatgcttctacgcccatataactcaaaatgaaggcaacaaatactaccagggtgcccactttagagaagtcagggaagaaggtcttgctatccatttcgatagcaacgggggcaccggagtgcagataaatagccgctaatgcgatcaaaataaatgcaggtaacaggataccggcgaagaagccaactttagcaattcgcgccgtgtatttcgtgccaccaaactgcgttaatgccagcgcccaaagaatgatgagtgctgcaatagttttggtaatggggtcttcattcagcgctggccatttcaggatgtaggagagtgcccctaacacgaaatagagcatcggaataaaaccaatggcgatttgcagatagccaaaactgatcgctgcaaatccccatctcggccccagagtattacttacccaggcgaagacaccaccttcttcccagccgtcgacggtggccatttccgcagcacaaagtcccacgggaataaaccataaaatcccgcctaatagcaggaagaagactaaactaaagccgcttgttgcgaaggtagggtattcataaacagccattaccatgcttgccgttatggcaaagaatccaagtaatgtgagctgcttagctttacctgtctgtacacttgtagccatattatccccctaaaacggtattcctgtcggaaccgcacctgttttgttctgaagcgtattcagaacaatattttccgttgctaatgccagtgaacagactttggaaattgtcccgaaacgggttcgtttcgggacaccgttaccgttaaacgttatcaggtatgtttaaagctgttctgttgggcaataccctgcagtttcgggtgatcgctgagatatttcagggaggctttgtagtcttccagcaacagttcagcaaagtccatttcgaagccgcgacgacacataatgcgcatcaccacgatgtcggtggcttcaccgccgagagtgaaggccggaacctgccagccgcgcagacgcagacgttcagagaggtcatacagggtgtatcccggatcttcaccatctttcagtttgaagcaaaccgccgggatgccttcgtccgggcgacccgtacagatgaactcatacggccccagtttggcgatttcatccgccagataagcggcaacctggtaagaggcgttctgtactttggtatagccttcacgaccgaggcgcaggaattcatagtactgtgcaattacctgacccgccgggcgggagaagttgatggcaaaagtaccaatttgaccacccaggtagtcaacgttgaacaccagttcctgcggcagcgcttcttcgtcacgccagataacccagccgcagcccagcggagccagaccgaatttatggccactagcactgatgcttttcacacgcggcaggcggaagtcccagacgatatccggggcgacgaacggtgccaggaagccaccgctggcagcgtcgatgtgcatgtcgatgtcgataccggtatcggcctggaatttatccagcgcatcgtgcagcggttgtgggaactcatagttaccagtgtaggtcacgccgaaagtcggcaccacgccgatggtgttttcgtcacaggcttcaatcatgcgtttcgggtccataaacaactgaccggggcgcatagggatctcacgcagctccacatcccagtagcgggcgaatttatgccagcagatttgtaccggaccgcacaccaggtttggtttatccgttggtttgcctgcagcttccatacgcttgcgccaacgccatttcatcgccatcccgccgagcatacaggcctcggaagaaccaatggtgttggtgccaacggcctgaccatttttcggcgcaggcgcatgccacagatcggcaaccatatttacgcaacgcaggtcgatggctgcggattgcggatattcttctttgtcgatccagtttttgttaatggataaatccatcaatttgtggacattttcgtcgtcccaggtctggcagaaagtggccaggttctgacgagcgttgccatcaagatataattcgtcattgataatctggaatgcgacatcgtcgcgcatttcgtgcagcggaaaacgtttactttctgcgatagtggaaatagacttcgcaccaaaacgactatcgagtagttcgctccttaaatccgttacttgcttcttatccattttaaactccttaaaatgattggatcgcattaaaaaagtaggatttatcgataaagtaagcaagtgcaaaggactcgtgtttaaataacaaaatcctaatgttatttatcgtgagatattacgcgaataatattttttcattgaaaaacaatacaatatgaaattcttgggtggtggtaaggtgttttatgctgttatttttatgcgcattctgtgtctcctgaattatcacgtaaaaatcagaccttaaaatatcactattagtacttgattattattttgaacgcatttataaaattattacataaaaatagcgaatattgctaaaatccccgccaacgatgtgttgacggggctgttattattttggcaataatactccggtataagtatttaccggatgagaaagatattgtttaacggcagtgttaacattctctaccgtcatttgtttcaacaattgctcctgctcagtccatgctgcaggatcgtcatattgaataagactatttacaatagtgttcgctaattgttgaacgctacgctgttggatatcgaggctgcgctgaacgttttgctggtattcattcagttcttgctcactgatccctttagccagacgcttaaccatcacttcattcgctaacgttaacagttcatcatgtcgttctggttgacaagtaaaagccagcaaatgactgatatctttggcctgaggatcaacgctgaggcgagaagaaacgctgtatgctccagatgcctgttcacgaatattaacacgtagatcttttgccagtgcgacgttaaaagcatcgagcgccatacgcgtcggcagattaacaggtgtccgggaatcataacgcttccactgactaacctgtgccacaggttcattttgttcttttacagtaacgcttgcgttgtccgtcgcgcgagttaatggtttacctgcggctaatgggctatcagagtgtttgatacttcctaagtaacgcgtaattaacgccacgagtttgtcttctgcgacattaccgacaatgacaaacgtgatatccgctggagaactaaacaattggcgatcggcagccagcgcatctgcggcagtaaactgtgcaatctgattttcttgcagtaatttcgtgcggtcatcagcatagcgcgtctcatacatctgctgggcgaatttctccgctggacgctggtcgagcgttttcaacgcctgaatttgagcattttgtaggcttgcccaaatattatcgttaatcgtgctgtgggtgattcgctggttaatcaactgaaaaccaggttcagggttattagtccgcgcgctaacggagagcaacgtattcatgccactgactttactgctcatggttacgctattttccgcactccagcgtttcaggctggaagaggagagttcgccaacgccgcttccgctaactgctttatttgccagcgcgataagacttttttgctgcgcagggaaacttaaatcgcctttattgcttacggcaataatttgtagcttttgctcttcacccgcggattttgccagaataaccctggcaccattggaaagtgttaaacttgtcagattctccgccagcgtttctttgctgctaatttccgcctgtgggtctgcgtctactgttaagcttaaatttctgcctgggaagacgtaagccgccagctttttgttggcgtactccttttccagcgccaggatagccgcaggagacaatgcttttttggcggcaacctcattgtttaccatttgctcccaaaatgcgtcctggttctttcttaactgctgccatttttccgccagactttgcacggtaatttgctgccacagacgtttgctaagttgatatgtctcttccgggctcaagaacggcgtattatttaaactgctggatgccaggcgactggtcagcatacgtaaatcacgttcagcttgctgatcaaccgcatttttcagccaggtgaggcgggtagatttgacatcatcgagttcttcagcagaaaaaccatgctgatcaatggttgccaactctgccattaatgcattcgcagcatcctgcatattatcgtctcgtgcatttacacggaaaaacaggctctgataatcgggtgcaattttaacgctgcgcgcagtgccgccagaaatagtcttcaactcgccgctctgtatgcgttcctgcagacgttgattgaacagctgaactaacatgctccattcagcttgttcgataaagctttgctcatcgttcacttgtaccattggcaggcgataatagagtgcgatgccgttcacccggttttctttatcattaatgatattaaagcgcaggtggttttcggcttttgtcggccagacgcgattttcagctgctttgttagccggaagcttacttaaattatcctttatcagcgccagcgcttctttactgtcgatatcgccgaccacgataaaggtcatattatttggttgataccagcgttgataaaattggcgcaattgtgccggtgtgaccgtggcgacagtatccatcaggccgataggttcacggtctaaattacgggtatttgccagcaggaaagggcggcgcgcctgagaggtgcgccatttcgcatcctgatgggcacgccattcctcagtaattacgccacgttcagcgtctacttcgagtttttcaaaggttgcggcattactccattcactgaagattgccatcacttgttgcagattttgtttctgcgtagtcggcaaactcacctgatacaccgtttcgtcatagctggtataggcattaacatcgcgaccaaaacgcaggcccatactctcaaatgtttcgatgactttattacccggccatgtttttgtgccgttaaacatcatatgttctacaaaatgagccacgccgagctcattgtcttcttcctgcaaactaccggtatgaatttgcagccataaatttacctgatcctttggatgagcatgcggataaatcatatatcgcaagccattgtccagttgcccggtaattaacttttcatcctgcggtaaggcggcggcaatcagccgcccggggagcaacagagttgccactaacgtcagtaagaaacagaggtttctcataattatctccatgcgaaaaccgggcgaatttacccggttaagtaaaatccgaactattaaaatttcatgctgacatcaagccagaaagtacggccactggcgtaggtcgccacaccggtgttcgttgtatcaacagcggttttgctatccagtacattgagaatatcggcactgatcgtcaggttttgttgttgcagaaattgtggcgtccaggacaagcgggtgtcccaggtcaggctgctatccagtttttcgtcaacatactgcttgtaatcactatattcgctgatgtattgcgcatttgtcttaccaaggataatgcgagctttacgcgcttcttgccaggccagcgtattcgcccacactaacccgctcggttgatgcgtgaaatccatgtttaaggagatctttaatgggttattaaaatctgccactggaacgctatcgtaagagaccagattaccgttataaaccacctggttatcaccggtattgctctcctcataaccattgtttaagctcaagttgcccttgctcttgatatagctaaagacaatttgtgggttaatatctacctggcggatatgcaggggttcggccagttcaaaactgaggctgaagctatgcgttttggttttgccatcgttgttatattcagtaatggtggttttagtcgcgctgtcggtacgactgcttttgctgatttgatcatgcgcttcacggtaaacatagtttgcacgcgcaataacgttcttaccgattttctgctgcaatcccattgccagttcatcgttataaggcgttttcaaatcctgataacgcgtcagagttttattaccacttacgctttccgtccagctattgcggatatcacgtaatcccatatcaagaatattcccgccatagtaacggttataacctgctgtaatcatactggtttgattagcaaaaatatcccattccgtcataaagcgcggggagatattgtggttactcagatagttgtcatagtcataccgcacgccgggcattaaactcacattacgccagctaatgcgatccgccatatacagcgtgtagttgtcaattcccaggcggcctttacctttatggtaaatggtatggttagttttctttccggcagcattaatcacataggattcagactggttatggcgttcagtccacgcatcggaatagatgtattccgcgccgaagtagggttgatggctaacattacccacggcgaatttttgccagtccaggcgtgttttgaaggtgtaattatctacagcctgggaaatgtgtcctaatccgccacgggtgcaacgccctgtaatatcaccatatgtacaactaagttcggtgtaccagatgtcatgatcgtgacgggtataatcactaatatgatcccaaccaacggtggtacgcagtttggcccatgcgagctgcgtatccatatcccatgccagaccataggatttattacccatttcgcgatcagactgcgggaaggtgctggtattataatcacggctggagccggtatattttaaggttaaatcgtgggtaaagcggtcgctggcaaaccaggtaaatttgcttaatgcagtatcgataacgtttttatactgtgcccgaccggcgacaatgccgtcattgctaacataatccgcgcgggtgatatcagactggcggcggcttaaaccggcggtaacgccgaagttatcagcgagttcctgattaaagctcaaggtataaaagttctttttaaaatctggggagtaataagtacttccactagagccttgattaaatgcgctcttgttattctcatcgatatggcttgttaaccagtcgctacgcgtagtgcgataacccaatttcaccttgctatcatcagcgttgaagcgtttgatctttgcatcaattaccccgccattgaagcgaccaaattcaaccggcacaaaactgtcataaagcgtcacattgtccagtaagctgacatcaagataatacccctgactcatcccgctaatattggttgcactactggcatcggactcattcgctgggttcaggttattagttgcactaataccgtcaatcaaataggcattctggtaggggctcgcaccgtgaatagagattttctcagggcgaatatctccctggttcaagctggtactttgcgtactatccatgcgtaccgcagggttggttctcagcagatcgctgatattgccattcccggtcggtaaacgctcgatgctttcactggtgtaatgcgtgttgccgtttacgggtacagggacaggagcatagaccgtcatctcttcaaaaaaatgcatgtacatgtttttgtcatcgacggcctgcgccacatcagcgccacataaaatgacgccaggaataagaactcgcttcatttatttatatctccgtacagcagggcttttattgtttttataaaaccgcgctaatgtcacaaatatcatcggccaggttccagacaccgggttgatgtgtaaccataatgacgccgcttgtgggtagtttttcacgcactaaacgcagtaagcggatagcctcttgttcctcaagatgagaggtagtttcgtcaagaaatatccatttcggacgtcgtaaaattaatcgtgccagggcgatacgttgtttttcgccgctggaaagaatatctccccagcgatcgtggtcatgaatacgcgcagccaatttcccaagaccaacctgatgcagtacttcgctcaagcttttatcgtctacgggcaggggaagtgctttacaaataatctctttcagtaagccggttttgattaacggtgtttgactcacataccaactgtcagcaggagaagaaatatcacctttaaaccacggccagcagtgggataatgttttaagcagtgtggtttttcccgcgccagagtagcctttcagtaatagccatttgcctgggctaacatgaaagttcaggttctctaatatgatcttattatcaggcgtacgaatactcgcatcagccacttgtaccgcatgttggcaatttttaggcttattcgtagggcgctgttcagtgagttgatggaactcatacaagcgatcgataaccgcagccagttcagcaagttcgtcatatttataaataaaccagcttaaattgttgcttaccagcataaatgcctggcggcttttcatcagtccgcccagattgatctgcccgctaataaactgcggcaataacagaaagtagggaagaacgctaaggctgcggctataaatattctgccagtaatcaagccaccgctgacgattcattaaacgatgccagttctctttaatggtatgaaaattgtcgctcaactcctggcgttgtagagactcagcattgcttagcgcaatcagttctgcctgcttattatgctgcacaagatttgttcgaaatgtcgcttcgctacgttgtttttccacattaagcggacgaatacgtttacccaccttatgggtaaataaagttccaccgatcacaatgagcacgacggtatagaccatatacccctggatattccattctgttccaccaacagtgaaactgagcgtacccgcgctttcccaaagaataacggtaaaggtgatcagcatgctaagactctggatgaagccaaaactaagactgagcgttttgctgatcagtaagagaatgtcttcagcgatacgttggtcagggttatctgtatttttatgctcgccgtagatctgcgtgaagtagtagtttttatctgcaaaccaccgattaaggtagtaatctgttaaccattcgcgccagcgaatagtcagtagtttaattaaccatgttttgtttacggatattaatacaaagatccccagcagggcagggaaccaaaggacaagctgccaaagcttatcggtttctttctggcttagcgcattgaaaaaatcattattccagtcgtttaaccagacctgaattttaaccacgccaaggatcatggcgaggataataatgattaacaacacactagttttattattcttacgcagccaaaagggcttcaacagacagagatactttgctatcaacatacgaagcgtaatgggaatggttatcattagcgaaaattgattgtgccatccaatgattatctatggcaatgatttactgatgaaatttatttaagtatcatttaacaatatgaaatataaaggaatatttcattttcagtggttatggttatgctattgataatcaaggatattgctaatgccctgatgcataccacgtaagccaggattttcgcaagggaagatgatgatgacgaaacacccgacaggaatttatgtcgggtgccttgttaaggtcataagaaggaggctaagaatggagttaaaagagagcgttattaattattctccatttgttttgcaacatccataatgtggtaaagcggtactctgttcttagctaactctaccatggcgttcatataaggtaccatggtactaaaaaggattttataaccttcgcaaaaataagaaacagtctcattgtttactttagtaatacgatgcttaggacaaccgccattgcagataggtttatatgcacattgctgacatttcgctggaatccgttttttttgcgctgtcagttgtacactgttcatcgttttgagttcagatttattaatgtttccaattttgtactgtggatagacaaaatggtcgcattcgtaaatgtctccattactttcaacaaccagattatccttgcaggactcctggaaaatacaactggtatgcccattccccaaaaaacggctgacaaagctttcaaactgacggatgaaaatttcacccacatcgtttttaacccattgcataaaaatggtactcataaacttgccataagccgtgggaggcacagaaaaatcaatgatacggaatgtgttctcactatgaccactgaaatcaatattcggcgtcccggtttctagcaattcgataaattgcatatgtttactgccgatagattttaaaaaatgataaacctcaagagggtaatggacattaacgttattaatgacggttaacgtattaaactctacttgataacttttcagacgctcgatggctgctatcacttttgcaaaagtaccgttaccactattactgcgtctgtaacggtcatgtaactcctgggggccatcgatgctgataccaaccagaaattcatgttctttgagaaaggcacaccattcattattcaataaaatgccattcgtttgtaatgcattaaaaatacgtttttggcctgcatagcgttgttgatagtgaataactttacggaaaaaatccaggccagccagagtgggttcaccgccttgccaggtaaaatagacctgattgccagacgctgcgatatattgtttgatgaactctttcagagtgctgtcatccatccatttttcatgagtaaactggctctctttttcaaggtaaaaacagtaatcacatttgagattacattgaaaactggagggcttggctgtaacgtgcatcgctatctcgctcaataaggcggcggaaaaatccgccgcatgaaggtttagttatttcgcttcgcttagtgctttcttgatattgttaaacttctcctgatttacctcgctaagcggtggctggctgctgtcgataaactctcttaccacgccttgcatctctttaacgacctgcggattggcggcggcaaggttatctttttgctgtagatccgtcagtttgtagagacctaactgattgttttctactgtatagacaaggctataatcgttatttctcaccgtataagagaattggcttaagtcctcagtgttggggttatgcgggtaatcgtcactctgatggcgaacaaatttgtggtaattatcccagaatggaatattttcctcgtcaaaccagtgagaataagaggttatccaggtcagatttttatgtggctcgccttgtttcttatcttgcaaccagggcagcaaggaaacgccatccagcttaaggtcttttggaatgctgatatcggctgcatcaagagctgtcgggtagaaatccattgcggaaatcagcttgtcataattaccgggttgaagttttcctttccaccacataaacattggggtgtgagtaccgccaggataggtctgactcttatagcctttttgcgccccgttcagcggcagaggaccatcgataaccgcaccattatcggaggtaaagagaataattgtattgtcatactgtccgtttttcttcagttgttcgagaatgcgttttacaccctgatcaacagaataaacggaagcgtagtagttatctgctgtttgactaccggtattaaattgcttctgatattgatccggtgcaggattatcatttggcaggtgcggagcattataagccaggtaaagcataaaaggctggtcaagtgttttggcacgatcaacaacgccaattgcctcatcggttaactgatcgctgatataaccttttgcggggacacgttcacgatttttgaacagactaggggagttgtaatatgccgttcctgcagcgtggaatcccataaagtaatcaaagccacggttttgaggttgccattcttccgcagaaaatgtggtgaagttgtcatgatagtcacgcgtttgtttatcttccggtaccggcacattactgattttactcaagtgccatttacctactgctgcagtgtaataaccatgattctggaataattcaggcaagaaagtttctgttagcggaataccatcctgagcatcggtattggaatagacaccaaagcgggcgggagctcgaccggtcattattgcggcgcgggaggggccggaaacaccgtgtgccacatagccgttagtaaaacgtacgccttcatccattaaactaaggagcgtcggcgtacttttttgtgcagcttcaatggctttatctatccctattttgtaggtatcgacaacttcacgattttccattgtttttgggtcaaaagatcccttatcaaaaggaagttgtccataaccaagatcatccatggtcagtacgataatatttggctttcctttggtactgtattctgtcggcgtaaagtcactgaaagcaacgtttgttttggttgctttcagctttacatcatctgccgcatgagcagcaaatgcagccataccagatgccagtatcaaagatatgctggtacttacgacacttttctttaatgcagacttcataaatgttcctcttcttattgtacttaattccaaagtaattttacgaagagaaataagtggatgtaagtgaagttagtcacataaagagatagcagatttagctaaaaaaagggaaaaaacagtccataaagcgttgacattactttctgttctattaagtaatttctcgccgataaacaactaatttattgatatttaataaattattgcattttactgacaaaatgcagaattgagatcataaataatcatgcaacaggttatgcaagtgcataaatatgtgatggatgtcacttatttatttcaataaatatatcgcctaaaaacaacgcggggcagggaatggctgccccatttaattcttacgcagcgtgtgtggttgactactcgttagcaaataatcaaatagctaaagcattcatcgtgttgcccgtattcatacccgtgtgactttgacaacggtactccttagaaactctcttcggactgttgccgaaatgtttgcggaacgcataaataaaataagatgtactggcataaccacattgttcggcaattttattgacactaccttctacgcgtatcaaattttttgcgtgctgcattcttgcatctaaaagaatctgactgaatgtcgtttgctcttgcttaagttttttcttcaacaggctttcactgatgtacaggcagtcacaaatatctttcagcttccatgggtgcgccggcttcatgttgacaatatttctcactttcccagaaacggatagcacaccgttagttaatagtgtaatgaaacctttgcatgcggcaaaaatagacaggcaagaaaaaagcaaaagttcactaaaattatgatgattgcgttcttcgctgttgagataagcaatcatttcattaagcaatccagtcggtacattactagcacgtaaaaacttcgcaggaacaggcaccgtcactgtctggatgttagtgcattgtagatattttttaatggtattttcagtaaatccgatctctttaaaatgccgctcataaggttcaaaatgcgtacgaacagcgttatctaccatcaggatctcgccgtcagagaaggcgtaatctttatctaaaatgttagcgttgaaggcatgatgaataaatataacagaacaaacgaggctcattttatctccttaaaacaataaagtttttatcgatacttttttaacatttcatatttataatttgctgtttgttttcagccttgcaaactattgataatgaaatgtgtaagatctcttgcaatgcgacccatttctgaaatactcagctgatcaattgccgaaaaaatggctatcaacgtaagtgtcagtaataagacaaccacaattgcagacatgatttctttatagttgtctctttgcgtgattttgtttttcactgtggtcgcatgcatttcaaatatgtttatttagcggataacgttaaaaatcgttaatcagtatgcttaatataacaggctggagaaaagaggaaataggactggtgcttcagtactgagcggagtttcttacagctgtaggcagaagtttatatcttatagtatgtagtttaatttaatccatgtgagcaaattgcgaaataatagtcaatgaggaattcttctgctgtgcggatgacagcagaagaaatgagaagaggcattaattacttggttctaattcaaccggaatacttttatagccaggaatgccacttaatggatcgtggttatcaagtgttagcatgtgattgctttctggaaaataggtcaccagactgcggtcagccatagggtaaatgaccacttttaatctatccatgcggcgactgctgcgcttaccgtctggcgtaagcgcaataagattaactctttcgccgttttttacacggcaaattttagcttgtttagcactcataaagaccacatctcgttgaccgaatacccctcgatagcgatcatccataccataaatcgtcgtgttgtactgatcgtggctgcgtactgtcgccatgaccagcttactgttaaacgcactagagggatcttctaacagccctttgctggtaatgaaattagccttaccactcggcgtcatccagcgcctttcagcagctgcatttatcaggtgaaaaccaccgggatgacggatgcgctggttatagtcggcgaactctggcagcacagcttcaatgtcattgcgaatgcgatcataatcttccaccagatactcccaggctaccacgctctggggtagtgctgcctgcgcgattcccgcgaccactgcacactcacttttcagcattacaccggcgggttttaacacgccacggctggcatgaatcatgctcatactatcctcaacggttaccgcctgcgcaccgtttttttgcatgtcaatctcgctacgtcccaggaccggcagaatatagctatgccgtgcggtcaacagatgagagcggttaagcttagtggctacgtgtaccgccaaatctaattgcgttaacggtacagcgctcgcttcccgatctggcattgccagcgcaaaattgccccccatgcagatcaatgctcgagcctgccccgtacatattgcttgcatgctggcaattgcagcatgtccaggtgcatgaggtggggtgaagccatagcgctcacccagacgagccagaaactctgcagacggtttctcggtgataccgacggttcggtcgccctgtacattagagtgtccacgtagtgggcagatacccgcaccaggcttgccaatgttacctttcatcaacagcagattgaccagttgctgtacgttctgggtaccatgttcgtgctgagtgatccccattccgtaacagataatggtgcgttcggcagcggcatatgcgtcagccagttcggcgatttgtgtctgacttagtccagaaatacgttcgatatctttccactcggaattgagaacgtcacggcgtagctcgtcaaagccgacggtatgcgtttgaataaactcgtcatcaagcaaactaggccgacctgcggcgcttgcagcatcatcgcgctcaattaacaggcgcatcatccccttgagcaacgccatatcgccaccaatgcgcacgttatagtaggcactggccaactgagtctcagagttcgtcagcatttcaaacgggttttgcggtgcggtaaatcgctccaggccacgttcctgtagaggattgatggcgatcattttcgctccccgtttcactaaagcgcgcaagctagtcagcatgcgagggtggtttgtaccagggttatgcccaatgcaaatgactaaatcgcacttctcaaagtcttccagcaacacggtccctttacctacaccgatactcgctgccaaacccacgcttgtcggttcatggcacatgttggagcagtcgggaaagttattgctcccgtattcacgggcaaaaagctgataaagaaaggcagcttcattggaagtgcggccgctagtatagaattcaacctgattgggatcactatagctttgaaggcgtgcgccaatttcgtcgaaagcttgttgccagcttaatggcttgtaacagtcgctgacggcatcatatttcaaaggctgagtgagtcgccccgcagcctcaagctcgtggtctccccaggtaagtaaactttgaaccgtattctcagcaaagaaagaggcgtttacctgcttatccgtgacttcccaggcgattgcttttgcgccgttttcacaaatgtcgaaactcgcactgtgcttaggatctggccatgcacaacccggacagtcaaagccctctggcttattcatgtcaaacatggcaataacatcctggcgtatatccatctgcttacgtactgcattcgctacggatttaacagcaccccaaccacctgcagcaccctggtaggattcaatttttttcttcatctacttatcctgtgtggaaatgaattattaggatttgtaatagcgatgatgcacagtacatacaaagggattatcgccaacatggatatataagagtaggggactactctctttctatttttaatctattatcgttaaacaatagattaaatacgataagttaagcatcatctctcatagtgtttaaattaacatatttttcaatataaaaaataagactctggcttcaattgtgcgcggattttcttacaggtgtaggctaatagccttcacaaaataattatccgcgcaattttcgtgaatggagcgcatagactaaggtcaaaatcacaattattcatagataaaagtgacaccaatgacactctggacggttccggcactaaccttgtttcctgtttgtccataggttgcgcttaaacccagaggtactttgcttttatttactgtccccagggagacattttctcccgtagccagtatttttccattacgcattagagtgacacccactccgcttgcttttgttgcatcaggtgctgtgttagcaaacacttgtcggctactgtcagtggtggcaccgctaagataaaaactgagcttttgttcgctactgcaatatacgccaaggggtatttctgcgcttccaggaaagtccgggagatccacggtgacatttcgactatcaacggtgcagccgcctgttggcataacaacattgttattactaataatattccacgtaaaattacgcggatttccgcttcctaatgttgcaattttatacatatgaatacgggcaatgacttcccccgcttttatgacaactccaccggccgccccaactggggtaatatagagttttaacggtaatggcatcggtgtcttatcaccaatatccaatacgttggtatttgtcgtcaacgggaaggggtaggtcacattattccagtacaggcttcctttataactctgtagggagcctgcgaaagcactgccttgtaccaggtttatatgatcagtgtcgtaccagccgccgtaatcattccagcaacttatatgctgagacaagtctacaaccagattctggcccggctgtattacagggtcgagattaacataaacagaggttgtacctgctccaatactactcccgccatcgacattacaactgaaggcaaaaactttgcctgccattaatagaagataaataccgaacaggacctttatactgattgttttacccatgatatatcctaaggttaaaaattgatttaaaaagaaggctaagaaaatcgaatcgacgttattgccaggtgtagatcacattgattagcgcctcgatcgttccctggcttgcgtttccattcaccgtgatagctcttgccttaagtggaaactgtgcattacgagtgatctcatcaacaataaccgttttgctatcgccattttttaacgcagcatcctggtcatccctcagctctatctgaatattttcggcagtaccttcatttttgtaataacccgtattgtcagtactacctgtcacgattgccgtcactgcacttgtttcaaccggacaatcggttaaactcaaagtaatattgtgccagccagatgcagaaccaggttgttgcagattgcgcgtataaagatccccgagattaacgttagcttctttggtttgaatagtgcagggtttagcgactacccgaccattaacagtgatagtgacatcggcggcctggagagttgctgtgaataacgcgcaaaacgtagctaacaggaacctcttgtgaagtcttttcatatctgactctgattattgaaattcaagggtaaaggttgcgctagccctcaccagtcccggattgacggacttctgagtactcttcagacgagcggagtaaggcaaaatattgttctgttctggtaccagtgggatccactgcatcccggcatgaagatcattcagtttcaccggacgcatatttgcgtccaatatttctatacccaaaccggaggccgtattgcttccttcatccagtttcaacaaagtattattttctgcatcctcaataccgttaaatgcaacccgaacccccgttgtccctttgctgcattcacttaacgtaatctgaaaagggacggctggacttgtgctaccggtcgttggaaattgtctggcactgtttttttggagatctacggtaaaattaaggctatcgctactgactgtgcagccataatcgaggacgcgcccgctaattttaataacgctatctgcggataaagcagaataggtggttaaccccagacataaaccgaggaaaataatgttattgtatttcataatctattgttccttagcgacagattgctgtctgctggttcagtaaggtaccaggagaaacttcaggaagcttgtactcgacaatacagttactgtttttatctttgccccaactaacctgtaattgcccactctgtggaagtccagtcagataaacctgaccattttccgcgacaatgctgccatttttattctctccgtgtgtgacaattgcaccgaatggaacgctcttattaccgtacttcaacgtcattaatactttcccgccgatttgtgcattaaatgttgctctggcaatagcaccgtgagttgggatgacagtgaccacggtttcatccagttcaacattatctgcaagggaattcgcgttaagagcaacacggttttctctatattctgtcgcaaatggtaatatggcatagccacgccagtcggtatgaattccggtctggttctctattttgacattatcagcaccaggagccttaaccagaaccattgtgtcgcccagcggctgtccaaaggtgatgccatcagcatgagcaataatcccaccactcattccgtaataaatctggctgctgtcaccactccgactgtaaccgacattagtattaccataagctccacgataattaagagaactgtaaccactggtgccagagcttgtattacctccgtgggtgttaccgacctgaacgctataattcaggttattatccggcagcagagtgccataaaccccgcttagattggtcatgccgcctttcaaatcgttactcatactgtaactggcgttactattacgaaatgcgctctgactgtctgtacgcatccaatgactgaagggaacattaagcgtaaaagcgagtaaatgatcccgatcgttttgccatatattattggaatagctgtaattcaggctagtcgtaatatcaccaaacggcacatttaatccaaaacttatttgctggtcgctgcgactcgtgttccagtaactttggcgactggcactgaaaaatgtcgtaccgtaatttccaagctgctgagagatgcttatttgttcctgaccacgcttactgtagaacagattaaaataatcaataaattgtgtctgctcattggtgtctccggtaggaggcttgacggtgtaaccactcattcgactgtaggcactgtcggataagttataaaaaccttgcgtagaatagcgatatcctgcgacctggatattggttccacaacaagtttattgctgcacttgttgaagagagtatttgcaaaaacattttatgtcgctaaataacatgacgatttcattatgcatgttatttataaaccgtgactaaacagaatattattgcgaacaagggaagtgtcaggaaaggtcaagagctaccaatggttaatatggctataaatcattagctatggttaatgtttgcttgctgaaactaacaccgaattgctctaaacagataagtgcagggtttattaaagctgtccgacagactttcttaacctggtaatatctctcttgggtgactctccaaacatccgcgaatattcccgacactaatgggatagctttcgtaaccgacagcataggctgctgtggtgacatcgtaatgttcattcagcatctgtcgcctgacttcattgagacgtagccatttctgataccggagtggactcattcccgcttgatccgtccttaaataagtaacagcaccctctggtgttttcgtatgcagtgtctatgcgacagacactgcgctcttagcatggggcagggaataaccaggctatttctccatgcacaggccaattatgaaagaggagaggcttaagttcttgaaccctgaacgaataacgactaccagaaaagcacttcgcatcactcagacatgatttaacataatatacattatgcgcaccaatataaaccaaggaagaatccagtcgttggcggtcatgattgtcatgctcattaacaatgaccaaaccccatatctcacttactaccgtattctcggcttaaccgtccatgcaacctcaacacattgctttcaactgccgtcaccacgttctccggaaaatctgtcggtaaactagtcttcacgttatccagtgctgctggaatcattctggcaaagtcactcaggatttcatgcatctgcacttccgggaatctcagcacctttgctgtcgccaaaaaatgtcgcggataaattttatcgattgccgtttttttgcctttggatgcgttaagccccattgccagtttgagatcgctgatgtgtattcccgtaccgccaaggaccggaaatgcactaatgatgtcgtaaaatggcgtgagtcgataactgccgccagcctgaataaatacggagaagttttttgcatgaccgtccgttgcgccaatcaaccactggaagacctggaatttcataaaatcatagcgatctttcagcgcctcgctggaccccatcaaaaaagccatgatccgcgcgatgcctgggcctccatcactttcatatttcacgctactaggtaaaccgaatgtctgacacatatcctcctgtggcaagcgaagtaaaaccgttcgctcagcattccaacgcctgtcaaaacgttcgaccgctaacgcgcgcacatttcccgctttaatgatttctgcgtccggaacattcaacccaagttctttcgccagcagcagacagtaatactcattatcaacgctttggctgagatcgagcgtcgcattgggctgcctgatttcgccaatcggtaatttaatgatgtgcgtcgtcggcgttattcctttcggaatgcaccagtcattgcctattctgagcagtgctgtcttctcctgtgcgccagcaacgctgatgcgaaagtcattttcttctctaatcatgcctagcgggatatctgctttataagccgttaatacttcttcaagtctggcttcagtaagcttttcccatgccattatcggatgcgttacggtttcgtcttcgggtattaacgtcacggcaccaacgctgtctcgccctatttcactcaataaatcaaacggttgtctggatttggcatgataacgtttaacgatccggtcacgtacaatcgggctatcgggtaacaggttatcgaagaagttaaatacggcatcagaggtgatattccccctctgcaatggcaggctaagactcaacggtctggcataacggcttgctaaccactccggtgcatacttaaaggtgtgcgcgccgttggctaacttcgttaactcgcctacccgctggttgttcatccaagtgacaagtttaggcattaccactccagattttgctgttctgtactttctgggctggcatttttcgcgtcgcatagcgtcatactgagttcaaggctctgtaaaatcttaaaaaatgtcgtgagcgtggtattgtcagggttgttttcgaaattggaaatcgtcgcctgcttaataccaatttttttcgccagctcgctctgcgtccagccattttgctggcgaaccagtttcattgcattcgccaattgcgttgggctatagatcttctgaaagctcatcatgtcatacgtccacagcaagtttatccgcttaaggggatattataagttttatcctttagtgaggataagtcaatctggaaacacatcttatccgctctacgggataaacgctgcgatatccgcgatcgcggataaaaaggaggatttaaataaggcgttgatgcgccgtttgaagtcggcaatattaagccgcatgccatctcgacatgcggcttatacggtttaccagctatatttcactcccagcatgccctgagtatcgctatagcctttatcacctagttgcacaccgacattcccccacaggctaaggttgttatttactttcgcctcaaccccggtacgtacttcaccgagattacgcgcaccttcacggcctacggtttgaccattcatcttcacggcgtagactttgctattgttgatccagttcgcttcaatgtaaggctggaactcacgctgtttaccatcgtcacgctggtgatggctgttcaggtaggttttcaccccaagtcgcgtttgcacatttccgtcgccttccgtttcaatgcgcgttccgtctttccgggtatggtcggaatctttcacacccatccaggtgatttgcgcctgtggctggacgtaccaggtattcagcgtcccttcgctgccgctaaatgttcccgcttcaaaggtatacccaccctcaacagaggccgtcacaccgcgagaatcatagtcgtcagcagaacggttatcggaactgacgctgttatcaaaccagttatacagcgcccagctgtcaacataagcgccggtcttattcgcatcgttctgataccaggtcgcgtacagcccagcgctgtaaccgctgatgcgcccatcgcttttataacccacacgattactctgagtattactgtgctgattggcgtagcctgccatcacgccaagatgccagcgatcctgcgcgttgctactccactgcgccaaatcgccgcctagctgcaatacatagcggttagcctgagtatttagctgaccgtcaccggccctactacgttcgtgccctccgacatgacgcatccacatactgcttgcgctcccctgagaatgcagactatctgtatactgcggctcacccagacggtcgtgtaaacgatggctaaacaggctgttggctgcggcaatgttgctgatatagcttccggcctccgggcgataaacacttgggccttccggatccacaacagggggattattgatgggatcgggtgtatccgctggcgttacgccgtcccatttactggtcagataccagtttttctcgtcattccccttccctttagccagcgtgtagacgtaagccccagcttcgacagttccggtggtcagcgcgaagttacctgcagaattaccgccaacctcaatgagttcaataccgttgaccgtttgtgcaccgacgccgccaatgttatcaacccgaacgcgagtgttcccttgggtatcgcctttcacgttcatcttatcggtggggctattatcgccgcccagcgtcgcgttgaacgtcatcaggccattgtttccggtatagttgccgttaacggtcagtacattccccggtttccccccttcgctattcatttgaaccgtgccgccattctccaggttgccgccgatagtggttttagcgacacgcagtgccccccccaggcataacgttcatatcacctgcagtggtgacatttccgctcatcacaccgctgttatggatattaatgtgttgacttgccatattaatggcagagtcggaaccgaaagcaatttccccccccacgatatccgtcgtaccctgatatgccgcggaatcgttgttaagagtcaggatcccggtacccagttttgtcacatcaccgctaccgctgatactgtgcgtcatcgcccagctacgctcagtggagatggtgagcaggccattattgataacggaagcatcacccaggtttttctgctcgttgacgctgagcgcgctgcctgtatcaatgttgaattgccccacaaagcggctattatcgccatccaactctacatctgtcctggcggttgcgctcacgatacccttcccgcttatgctattacgcagttcgccagtcacgttttttagcgttaacagaccgtcattggcaatatttcctctgcctaacccctgagtattatcgaggctgacttccgcatttgggctaatgctggttaacgcattgtagcgtgcattaagcccctcgatagccagcgttccccctgtaacattcaggtttccgccacctgtcagttcaccctgactgatcccacctttatttaccgtcagcgccccctctttgaacaaaacagtgctacccatctgcccggtgaatgtctctaccgtctgcgtgcttccattaagatcgacgatggccgcgttgctgatgttcagttcccgggtgttgccaagtgcaccatccgcatcggtacgtaatgtccccatctgaacgtaggttgccccctgatagtcgttctgaccgttggaaaggctaacctgtcgcaccgtattgattgccagatccccttcaccaccgatttttgcgctcatatcggccgttgcgccataggctccgccatgttcggctaacgtcagcttttgcccaccatggatgttcagcgctttcagcccatagttaacgtacaaaccattacctggtgcggtcgtgaggcggaatccataatcaccctcggcgaccaccgttccgttttgcgcaatgtgtaacgttttgtccgcttccacctcgtcgccctgtaaatcacgtaacgttaaactgccaccgctcccaataaccgtttgcgccttcaccagttgaacgccgacatggctatcgtcgtgttccagcaaattgagcgtcgtcagagggttattcgccatgggatcattccacggtttaggcacgtcgataagcacgtcgcccgtcccgtttacctgatagttacggcctttccaggtgtagtcacccgcgccgacaaccagcgtatcgacgctgatatatccctccgcgagcgtcgcagcaggaatatccgtatcgaaaatgatggtacctccattcatggccagtccaccaatggattgctctccaacttttacgcttgtggtattttcactgtcagactgcaacatcgcgtgagtaagcgcagcggtgttgtcgcgttccagagtgaaggtactgtctttcagttgggcaacaccggcgaattcagtccctgttgcatgggtaaagccaaacatcttgtcggaggaactcagctgcactcgcatcaagccatcgcctttgagcgcattggtcagcgtgtaatctcctgcactgttcgtacttgcgagaatgtcgagcgtaccggggtttgcaatggttacttcactgctccccatgcccgttaccccatctgccgtatgagacgcaatggtcaggaggccgtcattgaccagcgttttaccgctataagtattccctgcattgaacaccgtatggcctgcatcatggatcacttttccgtctttatcgtcacctgtaatcagcatatcgacctggtagccggcatcactgttattggtatgattaaagacaaaaacgccttcgccaagaccaaactccactttcgtcgcattggtgataaatccggcatctgccgccgcctcaccgtgagcagcaccaatgtttagcgttcctacagcaggctcaaaaacacctaagtaaacttctccaccttcgacattcagcgtaccgttattcgtcagggttaacgtacccgtaccagatgtccctacgtacatattgaatgtttcaagaagagagttctgcccatccaccctcacgtcgcccttacttttgtcattgagagctatctgtgtatcacgcgctttaactatacctccggtggtaatattcagttcacccgtgcctaatacaccgacctgtagcaattgtgcgttagtagaacttgtctttaaattccagagactgtccgtactaatattaactatccccttaccggaggcatttcctccgataaatccatagcccgtactattaagggtggcaccattactgacatttacgataccgctaccaaaattaccgacattgatacccacagtatcgaagctacttgtcgcatccatcaggttcagtgtgccgataccgcttgctttatcgcccaaaaaagtaatattttggcttacgaacttaccgccatcgctaatattgaggtttccgacgcccgcaacaccaatggtggtatagacattcttattgacctcccacattccccccgtggtgatgctgacattcccgacgccggtttctccataaccgagactacttcctccgttgctgacaacaagcccctgattactgatattcatttcgccgtggccgtcataaccaagattagttccgagattagtgataacggagttcttatccttaacagtaatgttgcctgtgcctgtttctttcatccccgcagtgataattccgctatctactttgccttcactgctgacattaagttcaccgtcgccagcatcaccgatatagatatagcggaaagcttcgcccgttccgaggaaattccaatgccctttatcggtcacgttgacgacaccgtgggaaccgtcctgaacgcccaccaaactatattctttgttattaatcagtccattattggaaatattgactgtgccattaccgaaatatccattatagagtctgcgtaccgtgatgacagagtcttgatcctgcacattcagggttccgataccggtggcattgccaccgataatcgtattttcagccgtaaccaaccccccctcgcgaatagtcgcctccccagttccttgattaccaatttgaaattcaatactggaatcattattttttattagccactcgccacccttttcaacgacaacctggccattactgcccgcctgatagcctaaaatggcgacgatactactcgtgacgtaacccttatccgtaatatttaaactacctgtgccatagctacctatttcgaataattcggtcgtcagaacagagtcctctccctcaacattgaccgtcccgacgcctcctgtgctagaacctaatcttaaatagcctccatcgacgtgacccttctgtttaatattcagcgtccccgttccggattgacccacatttaaaggccttgcattatttccgctatcatacaatcgccaggtgccacccaaaacattaacggtgccctcactgtcctcattagcgccaatgacgctggtagtaatagtggttaaggaggcattaccgccagccaaaatattaagcactccagtgccataccagccaaccaggtaggcatcataagcaacatcagtatcaatattggtaatctgatcattatcaacttccagacttgcaccagacgcactaccgcttagtgccagcaaaacacccagcgtcaatctactgaatttcgttgtcagtccagaggatttacgcaaattaaccgtgcttgttttacctgccctgcgagttaattcgctgcaggcctgaaatacctgtagagtgcaattccatatcacgcgatagattctattcatataaacgctccatatacaaacaatacagccacgaaagagatgagtcgtcagacattaaaaatgaaacttattaaattgtcagaggtctgtattgagtgttagttggaggtgggaaggtgtcaatttggctaatttgctaatgctttcgaattgatagattaaaaattgcatagttcttattttatttaaatatgaactatgagttattgttgcttaataagaaaactgtttctttcaataggaaaattatcatcatcatatttaacaaagaatagcactaattgctaaaaatcgaagtttattaaaccccttttgcatccattagtgtctttaggaatattcgctataaaataagggttgtgcttaatgctttaagaaaaatagcaattttcccttgaatatcgtactggtgatggaacgatgaatctgcaagctggcttttaacaagccagctctaaaagaagggaaataagaataactatactcaaaaactaacagccacggtcatcatgatgtggctgtcaatgaaattataacccaggcgctttccataagctcgtcgtcagtccatgatcaaccagccccagctgatcctgataaactgcctgccacttatcgcgactatcctgataaagttcatgcttttccgggtctggtgtgtgcgtccgttcccagcgaaccaggcgttctccggtttctgccatactactaaaaattccggcaccgacgccagctgcaatggcacatcctaatgcagtggcttctttgaccaccggaatattgacgggtaatccgctgacatcagcgagaatttgactccataatttccctttactacctccgcctgcaaagactaagctactaggatgaatattgctgaaatcagcaatttgctgcaagttacacgcacttacaatcgccgcattttcttccagcgcacggaacaatgtcgctttgttacatttatccgggtcaatggacaagttaataaaggaaggcgcagcgtgataccaggttttaaagcgcattctgtcggagaagatcggcattacgccccagctcccaggcggcacccgactggccatctcttccagcagcgtataggtgtcgatgcctaaacgttcggcaatcagtttttcttcggcacagaaagcatcgcggaaccagcgcatggtgagtccggtaaaaaagcttatagattcagcttgtaccatgccaggaataacatgaggattaacgcgcacgttcatttctgggtctgtcaccggcgcggctaaatttacaacttgctgccagaatgtgccgccaagaaccgcggtttgtgccggacgcacaacgcctaacccaaggcaaccaagctgcacgtcgcctcctccaacgaccaccggagtgcccgccttcagaccgcagagttccgccgcttgactacttaccacgcccagcaatgtgccggtttctttgacaggagaaagaatatcggcacgtaggccagccatatccagcaatgcaggtttccagtcacgggtggttagatcaagaagtcccgtggtgccagcgttagagggatccaccgccagttcgccgctgagcatataggccagccagtcgctgatcatggtgatggtacttgcctgacggtaaatatcggaacgatggtgcgccagccaaagtaatctggggatggcacttaaagccagtgtttgtccggtcgcgcgataaacttcgttttcaaaggtattgttgtgcagttctttaagttcgctaacttcgcgtgccgctctggcatccacattggcgcaggcccagatcggggctccttcattattatataaaacaatgccttcacgcatgctacatgcgctaacggcagcgatatactccggggctatgccggcgttgtgcagcgcctggcgcatacactcacacgccagttgccagtttttgttgagatcaaattccatagaaccaggaacgtccggtactgccagatgccgccactccgcctgtcccactgctatttgattgccttccaggtcgaatatcacagcccgaatacttccggtgcctgcatccagcgccatcaggtagtacttactttcactaagggtaaagagtcgagccattagattatcctcggcttatgcgttctgtctgttcctctatacgttctccatcattcccggtaataaggtcatgcaaatttaactacgtaaaatcgccgctgctgtgtcctgatcggtaaccagtgcgttgatataaccgcctttcattgcagcggcaattgcttcggctttattttctccccctgccacgccaacccggacgggtatggtcttcagcgcgcttaaaggtaagccaatcagttcgttatgtattttgatattcgtgacaacgtcaccttttgcatcaaaaaagtagcctaaaatgtcgccaaccgccccttttcggccaatcattaactgttcgccctggctgatataaccggagcgaatgattgtcgcatcgtcctgttgactcacagcaccaatgccgacaatcgccacatccgctgcttgcgcggctaacagaacatctttgacgcaattttcattttttagcgtacgggcaatgtcagcggaggatgcccgcaacggagccggaataatattcacactgcacgccgcgttaagctgcccgattcccgtcatataagaaccgacgccaccggagagcgtgaccaggcgaatttgctgactgctaataaaaccacttaagcgttgcagcgtattcatggttgcctcgccaaaaccaatcgccagcatctgttgtggttgaagtaaactcatcaacatatgcgccgcgcctatccccagtcgcccaccgacatcagcatccgcaagcccagggatcacccggacatgttgcaggctaaactgacgacgtaattgagtttcatattccagacagccttcaaagcgagaattaatctgtacgcgaataatgccggactgatgccctttctccagcaatcggctcactttcaaacgtgtcaggccgagacgatcgctgatctcgctctgggtcagcccgtcgtgatagtaaaaccacgcgatccgcgcgacctgttcttcttcacacattccctgttcactaattgcgctatcgttgattgtcataattcattcttcactttgaacatatttaaatctttaatgcaattgttcagttcttgctcatttatatctgtgatggcaaccacagtttgactctacgagcatgaacaaacgcaaccgtgaaaatcaaaatagcataaattgtgatctattcgtcggaaatatgtgcaatgtccacctaaggttatgaacaaattaaaagcagaaatacatttgttcaaaactcacctgcaaaactgaacgggggaaatatgcaaacgagtgatacccgcgcgttaccgctactttgcgcccgcagcgtttataaacagtatagtggggtcaatgtcctgaaaggcatcgattttacgttgcatcagggggaggtccacgccctgctcggcggcaatggtgccggtaaaagcacgttaatgaagattattgccggtattacccctgctgatagcggtacgctggagattgagggcaacaactacgtcagattaacgccagttcatgctcatcagctgggtatttatctcgttccccaggaaccgctgcttttcccaagcctgagcataaaagaaaacatcctgtttgggctggcaaaaaaacagctctccatgcagaaaatgaagaacttgctggcggcgctgggctgccagtttgatctgcatagtctggcaggaagcctggatgtcgccgatcgccaaatggtggaaatcctccgcgggctgatgcgcgacagccggattctgatcctcgatgaacctaccgccagccttacccctgcggaaaccgaacgcttgtttagtcgcttgcaagagctgcttgctactggcgtgggtattgtttttatcagccataagctgccggaaattcgccagattgccgatcgaattagcgtgatgcgcgacggaaccatcgccttaagcggcaaaaccagcgaactgtctaccgacgacattattcaggccatcaccccagcggtacgggaaaaaagcctctctgccagccaaaaattatggctggagttacctggtaaccgcccacaacatgccgccggaacgccggtgctgacactggaaaatctgaccggcgaaggtttcaggaatgtcagcctgacgctcaatgccggagaaattctgggcctggctgggctggtgggggccggacgcacagaactggccgagacgctctatggtctgcgtactttgcgtggcggacgcattatgctgaatggtaaagagatcaataaattatccactggagaacgtttactgcgcggtctggtttatctgccggaagatcgccagagttccggactgaatctcgatgctagcctggcctggaacgtctgcgcccttactcataaccttcgtggattctgggcgaaaaccgcgaaagataatgccaccctggaacgttatcgtcgggcgctgaatattaaattcaaccaaccggaacaagctgcacggacattatccggtggcaaccagcaaaaaatcctcattgccaaatgcttggaagctagcccgcaagtattgattgtcgatgagccgacgcgcggcgtggatgtcagcgcccgtaatgatatctaccagctgttgcgcagcatcgccgcacaaaatgtggctgtgctgcttatctcctccgacctggaagagatcgaactgatggcagatcgtgtgtatgtgatgcatcagggcgaaattacccactctgcactgaccgagcgcgatattaatgtcgagactattatgcgcgttgccttcggcgatagtcagcgtcaggaggcgagttgctgagctaaagtcagcgtcaggaggcgtcatgctgaagtttattcagaacaaccgtgaaatcacggcactgctggcggtggtgctgctgtttgtattacccggttttctcgaccgccagtatttaagtgtgcaaacgctgaccatggtttatagcagcgcgcaaatcctgatcctgctggcaatgggcgcgacgctggtaatgcttacgcgcaatattgatgttagtgtgggtagcattaccggaatgtgcgcggtgctgttggggatgttactgaacgcaggatatagtctacctgttgcttgtgtcgcgactttactgcttggtttgctcgcgggatttttcaacggtgtcctggtcgcgtggctaaagatccctgccattgttgccacccttggcacgttagggttgtacagaggcatcatgttgctgtggactggcggcaaatggattgaagggttacccgccgaactgaaacagctctccgccccgctgctgcttggcgttagtgcaattggttggttgacgataattctggtggcatttatggcctggctgctggcaaagacggcgtttggacgcagtttttatgccacgggcgataatttacagggcgctcgtcaactgggcgttcgtactgaagccattcgcattgtggcatttagcttgaacggctgcatggcggcactggcgggaattgtgtttgctagccagattggttttatccccaaccagaccggtaccgggctggagatgaaagcaattgcagcctgcgtgctgggcggcattagtttgctcggtggttccggtgcgatcattggtgcggtactcggcgcatggttcctgacgcagatcgatagcgtactggtgctgttgcgcattccggcatggtggaatgattttatcgcgggtctggttctgctggcggtgctggtgtttgatggacgcctgcgttgtgcgctggaacgtaatctacggcggcaaaaatatgcccgctttatgacgccaccgccatccgttaaacccgctagcagtggtaaaaaacgggaggccgcataatgcgtattcgctacggttgggaactggctcttgccgcactgctcgttattgagattgtcgcatttggtgcaattaacccgcgaatgttagatctcaatatgttgctgttcagcaccagtgactttatctgcattggcattgtcgccctaccgctaacgatggtgattgtcagtggcgggatcgatattagctttggtagcaccatcggcctctgcgccattgcattgggcgtactgtttcaaagtggtgtgccgatgccgctggcgatactcctgaccttactgctcggcgcattgtgcgggctgatcaacgccggattaattatctataccaaagttaacccgctggtgattacgcttggcacgctgtatctgtttgccggaagcgctctgctgctttccggtatggccggagcgacggggtacgaaggtattggtggattcccgatggcgtttacagatttcgctaacctggatgtgctgggactccccgttccgctgattatcttcctgatatgtctcctcgttttctggctctggctgcataaaacccatgccggacgtaatgtgtttttgattgggcaaagcccgcgcgtggcgctttatagcgcgattccagttaaccgtaccttatgtgcgctctatgccatgacggggctggcgtctgcggtcgccgctgtgctgctggtaagctattttggtagtgcacgttccgatctcggtgcgagctttctgatgcccgccatcaccgccgtggtgcttggcggggccaatatttatggtggttccggttccattatcggcaccgccattgcggttttattagtgggatatttgcaacaaggtttgcaaatggcaggagtgccaaatcaggtgtccagcgccctttccggtgcgctacttatcgtcgttgtcgtaggtcgttccgttagcctgcatcgccagcaaattaaagagtggctggcgcgtcgggccaataacccattgccataaaggatatcttcatgacacttcatcgctttaagaaaatcgccttacttagcgctcttggcattgccgcaatctctatgaatgtgcaggccgcagagcgtattgcatttattcccaaactggttggcgtgggattttttaccagcggtggcaacggcgcacaacaagcgggtaaagagctgggcgttgatgtgacctacgacgggccgacagaacccagtgtttctggtcaggtacagttgattaataacttcgtcaatcaaggttataacgccattatcgtttctgcggttagccctgatggcttgtgtccggcactgaaacgcgccatgcaacgtggtgtgagagtgctgacctgggactctgatactaaaccggagtgccgctcttactacattaatcagggaacgcccgcccagttaggaggtatgttggtggatatggcggcgcgtcaggtgaataaagacaaagccaaagtcgcgtttttctacagtagccccaccgttacggaccaaaaccagtgggtgaaagaagcgaaagcgaaaatcgccaaagagcatccaggctgggaaattgtcactacgcagtttggctataacgatgccactaaaagcttacaaaccgcagaaggaatattaaaagcgtatagcgatctcgacgccattatcgcccccgatgccaacgccctgcccgctgccgcacaagccgcagaaaacttgaaaaatgacaaagtagcgattgtcggattcagtacgccaaatgtgatgcgcccgtatgtagagcgcggcacggtgaaagaatttggcctgtgggatgtggttcagcaaggcaaaattagtgtgtatgtcgcggatgcattattgaaaaaaggaagtatgaaaacgggcgacaagctggatatcaagggcgtaggtcaggttgaagtcagcccaaacagcgttcagggctatgactacgaagcggatggtaatggcatcgtactgttaccggagcgcgtgatattcaacaaagagaatatcggcaaatacgatttctgatgtgcattacttaaccggagtaagttatggcagatttagacgatattaaagatggtaaagattttcgtaccgatcaaccgcaaaaaaatatcccttttaccctgaaaggttgcggtgcgctggattggggaatgcagagtcgcttaagccggatatttaatccgaaaacgggtaaaaccgtgatgctggcttttgaccatggttattttcagggaccgactaccggacttgaacgcattgatataaatatcgccccgctgtttgaacatgccgatgtattaatgtgtacgcgcggcattttgcgcagcgtagttccccctgcgaccaataggccggtggtactgcgggcgagtggtgcgaactctattctggcggaattaagtaatgaagccgtggcgttaagcatggatgacgccgtgcgcctgaacagttgcgcggtggcggcgcaggtttatatcggcagcgaatatgaacatcagagcatcaaaaatattattcagctggttgatgccggaatgaaagtgggaatgccgaccatggccgtgactggcgtgggcaaagatatggtgcgcgatcagcgttatttcagcctcgcgactcgaatcgccgctgaaatgggggcgcaaattatcaaaacctattatgtcgaaaaaggttttgaacggattgttgccggatgtccggtacccattgttattgctggcggtaaaaaattaccggagcgcgaggcgctggaaatgtgctggcaggctatcgatcagggcgcttctggtgtggatatggggcgtaatattttccagtctgaccatccggtggcgatgatgaaagccgtacaggcggtggttcaccataacgaaacggctgatcgggcatatgaactctatctgagtgaaaaacagtaactgcggatctaaggagaagaattatgcacgtcacactggttgaaattaacgttcatgaagacaaggttgacgagtttatcgaagtttttcgccagaaccacctgggctctgtacaggaagaaggcaatttgcgcttcgatgtcttacaggacccggaagtgaatagccgcttttatatctacgaagcctataaagatgaagacgcagtggcgttccataaaaccacgccccactacaaaacctgtgtcgcgaaactggaatctttaatgaccgggccgcgtaaaaaacgtctgttcaatggtttgatgccgtgaggcgaatttatcaattttatctacaattggggtaacgcgctgacgggagtaaaaaaatgtctgactggaacccctctttatatctacacttttccgctgaacgaagccgtccggcggtggagctgcttgccagagtgccgctggaaaatgtcgaatatgttgccgatcttggctgtggcccaggtaacagcaccgcccttctacaacaacgttggcctgcggccaggataacaggcatcgacagctctccggcgatgattgctgaagcgcgcagtgctttgccagactgccagttcgtggaagcagacatccgcaactggcaaccggtacaggcactcgatctgatttttgctaatgccagtctgcaatggctgcccgaccactacgaattgtttcctcatctggtttctttacttaatccgcagggcgtgctggcagtacagatgccagataactggctggagccgacccatgtgctcatgcgcgaagttgcctgggaacaaaactacccggatcgcgggcgtgagccgttggctggcgttcatgcttactacgatattttgagcgaagccggatgtgaggtcgatatctggcgaaccacctactatcaccagatgccgagtcaccaggcgattatcgattgggtgactgccactggattacgtccgtggttacaggatctgaccgagagcgaacagcagctttttcttaagcgctaccatcagatgctggaagagcagtatccactgcaagagaacggacagatactgctggcatttccgcgtctgtttattgttgcccggcgtatggagtaaatatcacgtcagctggtaatgacgatcgggaagaatttttgctggaatttcggcttcatcgttcatctgtaacaggtcaatttcaatagcgttgcagatggcatccagtggtaaatcattgttttcagtaccgaacggatcttccagttcttccgccagacaatccaggctaataaaagtgtaggaaatcagcacagagataaaaggcgtcatgtaatgcaggtccacgaccagcgcgaacggcagcatgatacaaaacagataaacggtacgatgcaaaatcagggtgtaggcaaagggaattggcgtataggcaatgcgctcgcatcctgccaggaccgcactaatatcattaagccgatcgttgaggctaataaacaggatatcactaagctgtccattgcggcgctgaaccgccaaccattctcccattattaacaagatacggttagctggagagttgctagccagtacacgctgaagatcttcagtcttgagataatgagccagcacttccgcctgtggctgtttgcgtaatgtcatgcgtaaacagtgggcgaaagcgatttgcagccgggcaaactcccttacacttgcgctatccggcaatgtcgtttttacctcgcgcagtaagctccgactggcaatcatcaactgcccccaaagttttcgcgcttcaacgtaacgggcgtacccggcattattacgaaaaccaagaaaaatggcgatggcgacaccgagaatgctgaacggtgcgagggtgaatttgatgcccagatgcgtgtaccagggcagcatgaaaataacagcgatagaaaagagaaaattgagtagtaagcggctggatatcttggataatacactgccgtgccagacaaaaatacggcgcagccagtgttgttgtggacgaacaatcatggttatcttcaggcgtggaaaagtcgccctattaaacgtgattacgatcacattctcaagacgctacttacaaattacctacaagcttacaacattagcaggcgctgcatgtggcacctgttaatgataaaggcatataggatgttgtaactaatatggtgaaataagaaacccggtcgaaaccgggttcagaagtaacggtgttattagcacaacggacgtacagcttcgcgcatccctttttcgagaatcgcatccaggtcattagcaacctgctcgaccagaccaggcacttgcgtcaggtcctgctcccagtggtctttttctgccaaaacaatcgctaccagttcctgggtgccgataacacggtcacgatgctggctccagagttgctgataacgttccagccagtgtgcatcgtcctgtaccggatatgtttcgccgttacgctcaccacgatagaacgcaatcaatgccgctaatgcgaaagtaaggcgcgccggaagtgtgccgtttgccttctgccctgccagcagctgtggcaggatgcgggtgcggaacttggtcataccgttgagcgcgatagacagcagctgatgcttaatgtacgggttacggaaacgcccggtgactgcactggcgaaagattccagttcatcacgaggcaaatccagtaccggaataatttcttcgtagatagctttttcaacgaatgcgcaaatttcagcatcgttcatcgcttcacctacggtatccagccctgcctggaacgccaccggcaccagcgcggtgtgcgcaccgttgaggattgccactttgcgttctttgtacggtttaatatcgtcaacaatcagcacgttgagcggatatttgtccagacgcagttcagtcgctaaggatttcggtccctgaatcacaaacaggtaaaagtgttcagcggtgtcgagaaaaccatcgtgataacccagttcttcttccagtttagccacttcatcgcgcggataaccggtaacgatacggtccaccagcgtagaacagaagctgttagcctgatccagccattgaataaatgcttctggcagtgcccactcttgcgcatagcgcagcaccagttcacgcaacgcgtcgccattgtagtcaatcaactcacacggaatgatgatccaacctttatccagcgcaccgttgaaatggctaaagcgttcgaacagcagacgggtcagttttgccggatagcttaccgctggcgcgtcatcgaatttatcgcccgcatggtagctgatacccgcttcggtggtgttagagaaaacaaagcgcatttccgggttgtgcgccagtttcaggaattcatcgtattcactgtagacgctgatttcacgattaacgctgcgaatcagacgcgcgtcgctgaccgcttcccccttctcattcaggccacggataatggtggtgtacagaccatcctgcgtgctcagactcggcgggaaactagtttcaatcggacgaacaacgaccacgccagaattcagatcggtgtgctcattcaggagatcgatttgccagtcaacaaaggcgcgcaggaagttaccttcaccaaactgaatgatacgttctggatactgtgcaccgggaaaatcgcgacgatttagtgttttcacaatgggttcccttctgattagtcatacaacctgtttgaattggtacgacaggttagcaaactttaatacgccgaacccctgttttgatcaactcctgatgattaatgagcagttttatgagaaaagtgtggcgcggatcatggtttaatcgaggaaaaacgccttttcctggatcataaagtggtagaacacattgcattcaaatcgcgcgtaatgaataaagatgtcagacaacttcctcaccgtaacgcatagtgctggtacggttgcgcccatctttcttgctgcgatacagacacgtatcggcttcgaccatcaatttattaaagtcatcggtcagcgttaggtagcttgcgcgaccactaccgacgccaatacttaccgtgagataaagcgttttttgttgccaggtgaatggttgcagttcaacgcctttacggattttttccgccattagcagaccatcgacaggattcacgctcggcactgcaacagcaaattcttcgccgcccattcgcgccaccagccccttatcaccgacaatcttctgaatatgccgggcaaacacgcttaacactttatcgccacattcatgtccatagttatcgttaatgcttttgaaatagtcgatatcaagcagcatgacagtcagatgttgtgtctgtttcaggcttggacttttcagcgcctcataaagaccggaccgactgtaaacctgagtcagaaaatcaaagtcggctcgcagcgcaacttgcttcattaggctattgatcgctgccacgctaaaagaaaccataattgggcatatcgccatcgtggcaataccgagacgtgcggagaacatttgcggaatggagaacgggctaccgacgctgatatcaatcacgctatttgccaccagtacgatttccaccgcaccggtgacaaaggtcaacagacatgttacctgcggcgtatagcgcactgcacaccagattaatgcaggcagcgggaacgccagactccccgctccgccaatgactacgctggcaataacgctcacaataagcgcgatggcgggcatcatctgttctgctttaaagcgcggcagcactccaggaatagccaacgtcagcatacaaggcacgatcaacacgcccgtactgaattgctcactgaaccagtccgcaagcaaaggccagaaatccagactatcaatactgaccgaaccaagatagcatgttcgctgacagcggcggcaaataaaggtaccctgggaatgctattttgtcgttttccgcaattctcatggctgattcatctgtacaaccagccagtgatagattaccgccacgatataacgttgttgttcttcgcttaagctaacaccctgcggaatgttatgccacttagccagacaaccgcgacagcaggtcgcggtggcgtgctgagcgataaacaccggatgcccgcgcatgggggtttgcttaccgtcattagccggtaatgccggagcaagacgtttagcgacaaaatccgccgcatgttgttcgatgactggcgcgcctttctccaggcaatactgacgctctttcatgcccagacgaaagcgagagcgaaatttactacgggataaacgcgcgaagagtggatcgagagactgcattaataaacgctacgccctaactgtttcgtcaattgttcaagaacggcaatacccgcaaggctgttacctgcatcatccagttccggactccagacagcgatggccatttcatgcggaacaatcgccacaataccgccaccaacgccagatttcgccggtagccccacccgccaggcaaactcccccgcgttctggtacataccactggtcgccatcagcgcgttaatttgccgcgcctgcattggcgtcaccactggttcatcaatatgaatagctttcccctgattagccagaaagacaaacgtccgggccagctctacacagctcattttcagagcgcagtaatgaaagtagttttgcagaacggttgtcacgtcatgatggaaattgccaaagctcttcatcagccaggcgatagccgcatttcgcgcggaatgttcaaattcggaacgcgctaccaccgtatcgtaggaaatatcagacacaccgcttaagccgcgcacgacttccagcatacgttgccgtggtgcgcttaatcgcccttgcaacatatcgcagaccaccagcgcaccggcattaatgaacggattacgcggtataccctgctccatttccagttgcactaaggaattgaacggacttccagacggatctttgccgacgcgttgccagatttcctcttcggagtaatgacgcatggcgacaacgagactcagcactttggaaatagactgaatggaaaaacgttcttgcgcgtctccggcctgaaaaagctgtccgtcaacggtacagatagcaatccccaatcgggaaccgtctactgtagccagcgccggaatataatccgcgactttaccctgaccaatgagcggccgcacttgccgcaagatgttttctaaaattgcattatccatggcgactgccactttctactcctggaccgcaggtctgaaaagacctgcgagtatatcagagctgaatatgtcgcgtcagatccggtctttccacaccgtctggatattacagaattcgtgtaagccgaaatgggaaagctcacgaccaaagccactctttttcacgccaccaaaggccactcgcgcgtcgctggcacaataaccattgataaacaccccaccgcattccagacgtgccgccatctgtctggcctgtgtttcgtcagtggtaaaaatggtcgcactaaggccgaactcactatcattagccagttccagtgcatgttctgcatctttcgcaatggtgattgccgcaacggggccaaacatttcttcccgaaacgcggtcatttctggggtaacattcgccagaaccgttggcggatagtagttacctgccccagccatcttttccccgcccagtaacaaacgcgcaccctgcgccagggttttctccacctgatgatgcagctcatcacgtaaatcaaaacgagccattggtccgagagcgttctcttcgtcacggggatcgcccattttcaaggctgccgcagctgccacaaaacgttcggtaaatgcgctagcaattccctcttcgataataaagcgttttgccgctgcacatacctgtccggtattctgataacgtccggctaccgccgctttcaccgccagttccagatcggcatcgttaagcacaataaacggatcgctaccgcccagttccagtacgcattttttcagtgccgctccagcctgtgcgccaatagccgctcccgcacgaacacttccggtcaccgtgacagcagcaatgcggctgtctttaatcatctgactgacaccgtcgttgtcggcattcagccagccatatacgccttgtgggatacccgcatctttaaacacctgggcaatgagctgtgcacagcccatcacattcggcgcatgtttaagtaagtagccgttacctgcaagaatgatgggaacagcgccacgcatcacctgccataacggaaaattccacggcataatcgccagaatcgtccccaacggtcgatactcaataaccgcctgctgattttccaccagcgtaggttccgccttcagcattgccggaccatgttctgcataccagtcacacaaattcgcgcttttcgccacttcagcgcgcgcctggttgattggtttgcccatttcgcgggtgatcatttgcgccatttcttcgctacgagcgcgcagagccttaccgatatcacgcagtttttcagcacgataatctatatttgtctcgcgccagtcgcgaaagcctgctgccgccagctgaagtgcgttttcgatatcgtcagcgccagcccacggcagcacagaaagttgttcacccgtggcaggatttatgctaattgcatgagttgccggagtaatggtcatcggggtatctcctttatgagtcatggtatgaagatacgcagatttactcttgctttaaaatgaataatattaagccacttattcacgaatcgagaatgctatggatctgacccaactggagatgttcaacgcggttgccgaagctggcagcataacccaggctgcagcaaaagtgcatcgcgtgccgagcaatctcactacccgtctgcgccagctggaaacagaactgggggttgatctgtttattcgcgagaatcagcgtttacgtctctctcctgccgggcataactttttacgctatagccaacaaattctcgcgttagtggatgaagcgcggagcgttgtcgctggcgatgagccgcaaggtttattttctcttggtagcctggaaagcaccgctgcagtgcgcattccagccacgctggcggaattcaaccgtcgttatcccaaaattcagtttagtctttccaccggcccttccggcactatgctggatggtgtactggagggaaaactgaatgcggcgtttattgatggacccattaaccatactgccatcgacgggataccggtataccgcgaggaactgatgatcgtcacgccacaaggatatgcgccagtaacccgtgccagtcaggttaatggcagtaacatttatgccttccgcgccaattgtagctatcgtcgccacttcgagagctggtttcatgctgacggtgccgctccgggaactatccatgagatggagtcttatcacggaatgttggcctgtgtgatcgcaggagcaggcattgcgcttattccgcgctctatgctggaaagtatgccggggcatcaccaggttgaagcgtggccgttagctgagcaatggcgttggttaacaacctggctggtctggcgtcgtggtgcgaaaacacgtccgctcgaggcatttattcaactgctggatgtgcctgacagcgcaagacagggatatcaatgagctatttttgatagttcttgcggttaatatgctctatatagtgatgttccgatgacttatgactatatggggcaaatatggttacgccagtaagcatcagcaattacatatctcttcctgatgattttcccgtacgtaatattgcaccgcaggtaaaagaagttttaaaggattttattgatgcacttagtacaataatatgtaatgaagagtggcgcacgtctttaaacatcaacagtgccacaaaaaagatatttaataaccttgacaacttaagttatattcagaggacttcttttcggggtaacgacacgctatacaatgaaaaggttcagtttaaactcacttatcccgccaggaatggaagacacaaagaaaatattgaatttcaggtagtaataaatttaagccctatttatttagataattttcgccatgatggagaaattaatattttttgcgctcccaacccaaagcctgtcactatggggcgcgtatttcagaccggcgtcgagcgtgtactctttctgtttctgaatgattttattgaacaatttccaatgatcaaccctggtgttcccatcaaaagagcgcatacaccacatattgaacccctgcctagcgatcaccataccgctgcagattacttacgccagtttgatttgcttgtcctgaattttatctctcgcggtaattttgtcatactcccccgattatggaataactctgaggttcacagatggttcgtcaataaagatcctaacttgatcaccgccattctcgacataacggacagcgaattaaaagaggatttgttgcaaagcctgatggatagtttaggttctaacaaacatgtactacccgaagtctgcatctgctttttatcccttttagcagaacaagaatctcctcattttcagaacttgtttttatttttcgccaatatgttattgcactatcaccaatttatgaatcccaatgaaagtgatttgaatgacgtgttgatgccagcaagtttaagtgatgataaaattatcaaacatatggcgcgcaggaccctcaaactgtttgtaaaaaatgaaacaccgccaaaagttactcacgaagacctggtgaaaaacaggcctcgctcccctgtcagaccacctatacccgcaaccgccaaaacgccagacctccctgaacgtcattaaaccgtgatgttaccgactctctgacgcgtgaaagaatcagcgtcagagaaacggaaaacgcgatccagatcacaaatgcattgtattcacatcattaaccgttttaagatcatttcatcactttttcgcaactcacccgataatctgttatgacaacaaacactgtttcccgcaaagtggcgtggctacgggtcgttacgctggcagtcgccgccttcatcttcaacaccaccgaatttgtccctgttggcctgctctctgacattgcgcaaagttttcacatgcaaaccgctcaggtcggcatcatgttgaccatttacgcatgggtagtagcgctaatgagtttgccttttatgttaatgaccagtcaggttgaacggcgcaaattactgatctgcctgtttgtggtgtttattgccagccacgtactgagctttttgagctggagctttaccgttctggtgatcagtcgcattggtgtggcttttgcacatgcgattttctggagcattacggcgtctctggcgatccgtatggctccggccgggaagcgagcacaggcattgagtttaattgccaccggtacagcactggcgatggtcttaggtttacctctcgggcgcattgtgggccagtatttcggttggcgaatgaccttcttcgcgattggtattggggcgcttatcacccttttgtgcctgattaagttacttcccttactgcccagtgagcattccggtagtctgaaaagcctcccgctattgttccgccgcccggcattgatgagcatttatttgttaactgtggtggttgtcaccgcccattacacggcatacagctatatcgagccttttgtacaaaacattgcgggattcagcgccaactttgccacggcattactgttattactcggtggtgcgggcattattggcagcgtgattttcggtaaactgggtaatcagtatgcgtctgcgttggtgagtacggcgattgcgctgttgctggtgtgcctggcattgctgttacctgcggcgaacagtgaaatacacctcggggtgctgagtattttctgggggatcgcgatgatgatcatcgggcttggtatgcaggttaaagtgctggcgctggcaccagatgctaccgacgtcgcgatggcgctattctccggcatatttaatattggaatcggggcgggtgcgttggtaggtaatcaggtgagtttgcactggagtatgagcatgattggttatgtgggcgcggtgcctgcttttgccgcgttaatttggagtatcattatatttcgccgctggccagtgacactcgaagaacagacgcaataattgaaaggcccattcgggccttttttaatggtacgttttaatgatttccaggatgccgttaataataaactgcacacccatacataccagcaggaatcccatcagacgggagatcgcttcaatgccacccttgcccaccagccgcataattgcgccggagctgcgtaggcttccccacaaaataaccgccaccaggaaaaagatcagcggcggcgcaaccatcagtacccaatcagcgaaggtactactctgacgcactgtggacgcgctgctaataatcatcgctatggttcccggaccggcagtacttggcattgccagcggcacaaaggcaatattggcactgggttcatcttccagctcttcgctcttgcttttcgcctccggactatcaatcgctttctgttgcggaaagagcatccgaaaaccgataaacgcgacgattaagccgcctgcaattcgcagaccgggaatgctaatgccaaatgtatccatcaccagttgcccggcgtaatacgccaccatcatgatggcaaatacgtacacgctggccatcaagctctgacgattacgttcggcactgttcatgttgcctgccaggccaagaaataacgcgacagttgttaatgggttagctaacggcagcaacaccaccagccccaggccaattgctttaaacaaatctaacattggtggttgttatcctgtgtatctgggttatcagcgaaaagtataaggggtaaacaaggataaagtgtcactctttagctagccttgcatcgcattgaacaaaacttgaaccgatttagcaaaacgtggcatcggtcaattcattcatttgacttatacttgcctgggcaatattatcccctgcaactaattacttgccagggcaactaatgtgaaaagtaccagcgatctgttcaatgaaattattccattgggtcgcttaatccatatggttaatcagaagaaagatcgcctgcttaacgagtatctgtctccgctggatattaccgcggcacagtttaaggtgctctgctctatccgctgcgcggcgtgtattactccggttgaactgaaaaaggtattgagcgtcgacctgggagcactgacccgtatgctggatcgcctggtctgtaaaggctgggtggaaaggttgccgaacccgaatgacaagcgcggcgtactggtaaaacttaccaccggcggcgcggcaatatgtgaacaatgccatcaattagttggccaggacctgcaccaagaattaacaaaaaacctgacggcggacgaagtggcaacacttgagtatttgcttaagaaagtcctgccgtaaacaaaaaagaggtatgacgatgtccagacgcaatactgacgctattaccattcatagcattttggactggatcgaggacaacctggaaagcccactgagtctggagaaagtgagtgagcgtagcggttactccaaatggcacctgcaacggatgtttaaaaaagaaaccggtcatagtttaggccaatacatccgcagccgtaagatgacggaaatcgcgcaaaagctgaaggaaagtaacgagccgatactctatctggcagaacgatatggcttcgagagccaacaaactctgacccgaaccttcaaaaattactttgatgttccgccgcataaataccggatgaccaatatgcagggcgaaagccgctttttacatccattaaatcattacaacagctaattgaaaacgtgacaacgtcactgaggcaatcatgaaaccacttagttccgcaatagcagctgcgcttattctcttttccgcgcagggcgttgcggaacaaaccacgcagccagttgttacttcttgtgccaatgtcgtggttgttcccccaagccaggaacacccaccgtttgatttaaatcacatgggtactggcagtgataagagcgatgcgctcggcgtgccctattataatcaacacgctatgtaatttgttctggccccgacatctcggggcttattaacttcccacctttaccgctttacgccaccgcaagccaaatacattgatatacagcccggtcataatgagcaccgcacctaaaaattgcagacccgttaagcgttcatccaacaatagtgccgcacttgccagtcctactacgggcaccagtaagcttaacggtgcaacccgccaggtttcatagcgtcccagtaacgtcccccagatcccataaccaacaattgtcgccacaaacgccagatacatcagagacaagatggtggtcatatcgatagtaaccagactgtgaatcatggttgcggaaccatcgagaatcaggctggcaacaaagaagggaatgattgggattaaagcgctccagattaccaggctcatcaccgccggacgcgtactgtggctcatgatctttttattgaagatgttgccacacgcccaactaaatgctgccgccagggtcaacataaagccgagcatcgccacatgctgaccgttcagactatcttcgattaacaccagtacgccaaaaatcgctaaggcgatccccgccaattgtttgccatgcagtcgctccccgaaagtaaacgcgccaagcatgatagtaaaaaacgcctgtgcctgtaacaccaggctagccagtccagcaggcataccgaagttaatggcacaaaaaagaaaagcaaactgcgcaaaactgatggttaatccataccccagcagcaaattcagtggtactttcggtcgtgcgacaaaaaagatagccggaaaagcgaccagcataaagcgcaaaccggccagcatcagcggtggcatgttatgaagccccactttgatgaccacaaaatttagcccccatacgaccactaccagtagcgccaacaccccatcttttcggctcattctaccgcctctgaatttcatcttttgtaagcaatcaacttagctgaatttacttttctttaacagttgattcgttagtcgccggttacgacggcattaatgcgcaaataagtcgctatacttcggatttttgccatgctatttctttacatctctaaaacaaaacataacgaaacgcactgccggacagacaaatgaacttatccctacgacgctctaccagcgcccttcttgccagcagcttgttattaaccatcggacgcggcgctacgctgccatttatgaccatttacttgagtcgccagtacagcctgagtgtcgatctaatcggttatgcgatgacaattgcgctcactattggcgtcgtttttagcctcggttttggtatcctggcggataagttcgacaagaaacgctatatgttactggcaattaccgccttcgccagcggttttattgccattactttagtgaataacgtgacgctggttgtgctcttttttgccctcattaactgcgcctattctgtttttgctaccgtgctgaaagcctggtttgccgacaatcttagctccaccagcaaaacgaaaatcttcagtatcaactacaccatgctaaacattggctggaccatcggtccgccgctcggcacgctgttggtaatgcagagcatcaatctgcccttctggctggcagctatctgttccgcgtttcccatgcttttcattcaaatttgggtaaagcgcagcgagaaaatcatcgccacggaaacaggcagtgtctggagcccgaaagttttattacaagataaagcactgttgtggtttacctgctctggttttctggcttcttttgtaagcggcgcatttgctagttgcattagtcaatatgtgatggtgattgctgatggggattttgccgaaaaggtggtcgcggttgttcttccggtgaatgctgccatggtggttacgttgcaatattccgtgggccgccgacttaacccggctaacatccgcgcgctgatgacagcaggcaccctctgtttcgtcatcggtctggtcggttttattttttccggcaacagcctgctattgtggggtatgagtgctgcggtatttactgtcggtgaaatcatttatgcgccgggcgagtatatgttgattgaccatattgcgccgccagaaatgaaagccagctatttttccgcccagtctttaggctggcttggtgccgcgattaacccattagtgagtggcgtagtgctaaccagcctgccgccttccagcctgtttgtcatcttagcgttggtgatcattgctgcgtgggtgctgatgttaaaagggattcgagcaagaccgtgggggcagcccgcgctttgttgatttaagtcgaacacaataaagatttaattcagccttcgtttaggttacctctgctaatatctttctcattgagatgaaaattaaggtaagcgaggaaacacaccacaccataaacggaggcaaataatgctgggtaatatgaatgtttttatggccgtactgggaataattttattttctggttttctggccgcgtatttcagccacaaatgggatgactaatgaacggagataatccctcacctaaccggccccttgttacagttgtgtacaaggggcctgatttttatgacggcgaaaaaaaaccgccagtaaaccggcggtgaatgcttgcatggatagatttgtgttttgcttttacgctaacaggcattttcctgcactgataacgaatcgttgacacagtagcatcagttttctcaatgaatgttaaacggagcttaaactcggttaatcacattttgttcgtcaataaacatgcagcgatttcttccggtttgcttaccctcatacattgcccggtccgctcttccaatgaccacatccagaggctcttcaggaaatgcgcgactcacacctgctgtcacggtaatgttgatatgcccttcagaatgtgtgatggcatggttatcgactaactggcaaattctgacacctgcacgacatgcttcttcatcattagccgctttgacaataatgataaattcttcgcccccgtagcgataaaccgtttcgtaatcacgcgtccaactggctaagtaagttgccagggtgcgtaatactacatcgccgattaaatgcccgtaggtatcattaaccaatttaaatcggtcaatatccaacaacattaaataaagattcagaggctcagcgttgcgtaactgatgatcaaaggattcatcaagaacccgacgacccggcaatcccgtcaaaacatccatattgctacggatcgtcagcaaataaattttgtaatcggttaatgccgcagtaaaagaaagcaacccctcctgaaaggcgtcgaaatgcgcgtcctgccagtgattttcaacaatagccagcattaattcccgaccacagttatgcatatgttgatgggcagaatccattagccgaacgtaaggtaattcatcgttatcgagtggccccagatgatcaatccaccgaccaaactggcacagtccataagaatggttatccgttatttctggcttactggcatctctcgcgaccacgctgtgaaacatactcaccagccactggtagtgggcatcgatagccttattgagatttaacaagatggcatcaatttccgttgtcttcttgatcattgccactcctttttcacagttccttgtgcgcgctattctaacgagagaaaagcaaaattacgtcaatattttcatagaaatccgaagttatgagtcatctctgagataacattgtgatttaaaacaaaatcagcggataaaaaagtgtttaattctgtaaattacctctgcattatcgtaaataaaaggatgacaaatagcataacccaataccctaatggcccagtagttcaggccatcaggctaatttatttttatttctgcaaatgagtgacccgaacgacggccggcgcgcttttcttatccagactgccactaatgttgatcatctggtccggctgaacttctcgtccatcaaagacggccgcaggaataacgacattaatttcaccgctcttatcgcgaaaaacgtaacggtcctctcctttgtgagaaatcaaattaccgcgtagactaacgctagcgccatcgtgcatggtttttgcgaaatcaacggtcattttttttgcatcatcggttccgcgatagccatcttctattgcatgaggcggcggtggcgctgcatcctgttttaaaccgccctggtcatctgccaacgcataaggcatgacaagaaaacttgctaatacaatggcctgaaatttcatactaactccttaattgcgtttggtttgacttattaagtctggttgctatttttataattgccaaataagaatattgccaattgttataaggcatttaaaatcagccaactagctgtcaaatatacagagaatttaactcactaaagttaagaagattgaaaagtcttaaacatattttcagaataatcggatttatatgtttgaaaattattatattggacgagcatacagaaaaagcaaatcacctttacatataaaagcgtggacaaaaaacagtgaacattaatagagataaaattgtacaacttgtagataccgatactattgaaaacctgacatccgcgttgagtcaaagacttatcgcggatcaattacgcttaactaccgccgaaagttgcaccggcggtaagttggctagcgccctgtgtgcagctgaagatacacccaaattttacggtgcaggctttgttactttcaccgatcaggcaaagatgaaaatcctcagcgtaagccagcaatctcttgaacgatattctgcggtgagtgagaaagtggcagcagaaatggcaaccggtgccatagagcgtgcggatgctgatgtcagtattgccattaccggctacggcggaccggagggcggtgaagatggtacgccagcgggtaccgtctggtttgcgtggcatattaaaggccagaactacactgcggttatgcattttgctggcgactgcgaaacggtattagctttagcggtgaggtttgccctcgcccagctgctgcaattactgctataaccaggctggcctggcgatatctcaggccagccattggtggtgtttatatgttcaagccacgatgttgcagcatcggcataatcttaggtgccttaccgcgccattgtcgatacaggcgttccagatcttcgctgttacctctggaaaggatcgcctcgcgaaaacgcagcccattttcacgcgttaatccgccctgctcaacaaaccactgataaccatcatcggccaacatttgcgtccacagataagcgtaataacctgcagcatatccgccaccaaaaatatgggcgaaataactgctgcgatagcgtggcggtatagcaggaagatccatattttccgccaccagcgcccgcaattcaaaatcatcgacatcctgcattgcttcgttttcttccaggcaatgccagcgcatatcgagaagtgcggcgctaagcagttcgctcatctcataccctttgttgaacaggctggcattacgcattttctgttgcagttcgtcaggcattgctgccccgctctgataatgccgggcgtagcgagcgaatacctgcggatgcgttgcccagtgttcgttgatttggctcggaaattcgacaaaatcacgcggcgtgttggtgccggaaagcgtggcataacgctggcgggcaaaaaggccgtgcagcgtatgaccaaattcatggaataaggttatgacatcatcccagagtaacaacgcaggctcaccggcagcgggtttctgataattgcagacgttataaattaccggatgtgttttattaagcgtactttgctcaacaaaattgcccatccatgcaccgccgcttttactatcacgggcgaagaaatcaccgtaaaataacgccagccccacgccattatgatcaaaaatttcccacacacgaacgtcaggatggtagacaggaatatcaaaacgttcgacaaacttaataccgaagagctgattcgcggtccagaatacaccttcatttaacaccgtgtttaattcaaaatatggcttgagctgcgcctcatcaagatcaaatttctcccgccgtacctgttccgcataaaatgcccagtcccacggctgcgcgctaaacccgccctgctgcttatcgataaccgcctgtatggaggctaattcatcgctcgcacgttgacgcgccgctggaacaatttcccgcataaagttaagtgctgcttcaggtgtttttgccatctgatcggcgattttccatgcggcataatgaggaaaaccaagtagtgttgcctgttgtgcacggatctccaccagacgttgaatgatagcgcgggtatcattggcatcatttttttccgctcgcgtccagcccgcaataaacagtttttcacgcgtcgcacgatcgcgcatttcggcaagcgccggttgttgggtggtattcagcagcggaatcagccatttgttatccagacctttctcgcgagccgcctctgccgccagcgcaatctcttgctcactcattcctgccagctgcgcgatatcgttcacaaccagaccgccggatttatttgctgccagtaatcgctggttaaactggctggtcagggtcgcagcttctgtattcagtacttttaattttgctttatcagcttgcgcaagtttggctccggcaaggacaaaacgttgatgaatcacctccaccaggcggatggattcactatcaagccccagggattcacggcgctgccagacagcatctacccgcgcgaataattcaccgttcagatagatatcattagccagttccgccagttcagcggaaaactgctcgtcaagacgctgtaattcatcattggtatgcgccgcagtcatcgcaaaaaagacgctggtaacgcgggtaagtaattctccgctttgttccagtgccagaatagtattgttgaaatcaggcatttgcgggttaagcgcgatggcagcaatttctgcccgcttttgctgcattccctcatcgaatgccgggcgatagtgatgattggcaatttgatcaaaatggggagccagatacggcagtgtgctttgcacaaggaaaggattcattgttgtcattttcttctcctgaacgcgaggtgttccatagcgtaggcttactgataacggagtgcaatcttgcaatccagtattacccgctcttaagcatcccgtgctatgttattgacacacaaaagcgttgaggaacagtgagaagcgcagtgcccagccatcccgatactgctgctttcaccaaatccttagtgcttctttcgtgtttttctattgtcataatggttatctctaaaaaagaggtaagatgcgtactacttactcgccgttattggtattattcagaaaaagtgagtaagactttgcagcaatgtttttgatcctgttcaaataaactaatggcatcagcaacatgctggaaatcaaacgtatgggtaattaatttttctggtttaattaaccctttacttaaccagtcgataacgatcgggaatttatttgcatttaagcgactagagaaaatagagagttcttttccggtaattccttgctgaatcacttcagacggttcactggagaaccccatcaatacaatacgtgccgctggagaagccagcgttacggcctctttcaggatagaaggatgacaagccgcatcgataattaatgtcggcttgatgcctttttcagtgaaaatctcgccaagcggtgtctggctgttattaatcgcccagtcagccccgctctctttcgctttttccagtcgttcatcaatgcgatcggcaacaatcacatttttaacgttatagacgccttttaatacctgaacgatcgtcaggccgattggaccggcaccataaaccagaacggtatcattttcagtcggttgaccatgtccggttacgttagccgcaatggtaaaaggttcgatcattaccgcatattgatcggccactgcttcaggaattttccacgcattttttgccggaaccacggcatattcactgaaaccaccgtcagcgtgcacacctaatacagccagtgtcgtacaaacgttcggtttacctatagagcacggatagcaatgcccacagctgaccaccggatcgacagcaacacgttcaccgactctggcgctttccacgccttcacccactgcatcaatgacgccaaagaattcatgaccaatgacgcgcggatatttcgcaaaaggattatgcccacgataaatatggctatcactaccacaaattccggcaagtttcacttttactcgtacttcacccgcactcggggtgggtatttcacgttcgacaatcgccagttgattcggtttttcaattaatatgcttttcattatcttactccttaccagttccacagcgtgccatcttccagacgtgcgactggtagataagcaggttcatagggatatttcgccgccagcttttcatcgaattcgataccaagacccggtttgtctcccggatgcatatagccgttatcgaaagtccagttgtgcgggaagacttcgagcatttgttcggaataacccatgtattcctggacaccgaaattggggacccacagatcaaagtgcagcgccgcagccatgcagactggactcaaatcggaaggaccgtgactgccagtacgtacctgatacaggctagcaaaatcggcaatccggcgcataccggtaattccgcctgcatgggtcagcgtggtgcggatataatcgatgagttgctcttcaatcagttgtttgcagtcccagatgctgttgaagacttcacccactgcgatgggtgtgacggtatgttggcgaatgagacggaagcattcctggttttccgcaggcgtcgggtcttccatccagaacatgcgataatcttcaatgcttttaccaaagcgcgccgcttcaataggcgttaagcgatggtgcatgtcatgcagcaaatgttcattaaaaccaaacttgttacgtaccgcgtcaaacaatttcggcatgaaatcgaggtatttctccgtgctccacagctgctcttccggccactgtcctttggttgcgggttcataagccagacctttacctttgctcatgccgtaggtggttttcataccagggattccgcactgcacgcggatggctttgaatccaagctcttgatgacgggcataatcatccagagcttcatcaatactgtgaccggtggtatggcaataaaccatcaccccttcacgagacgcgccgccgagtaactggtaaagcggcatgttggcagctttggctttaatatcccacagcgccatatcaaccgcactaatggcgctcatcgtaaccggaccgcgacgccagtaagcacctttatagaaaaactgccagatatcttcgatacggtgcgcatcgcgaccaataagctgcggacaaaggtgatcctgcaaataagaggccacggaaagctcacgtccattgagggtggcatccccaaggcccgtaataccgtcctcagtggtgatttttaatgtgacgaaattacgccccggacaggtaacaaaaacttcagcctttacgatcttcatgttcgattccttgcatcgcttgtcgtgatgcatgaaatctacgcaactgagctactaccatacaagtataaagatcgaaaaaagccggagtgatcacaaaaaaaggcgtatatttgcgctgtgaatggttgacaaaagatgaaatagaataccttttgtcagctgacacttcctcttatcttattgataaaatggatttatgttcttacgtgcgcccccagcccgcaacaatgatcaacatgccgcaaagcgcaatcaacgcacccgtccagtcataaagagtcagtttcacgccatccacaacgcgcagccacatcaacgccgtgcagacataaacgccaccataagccgcgtaaacacgcccactcgccgctggatgcaacgttaacaaccagacaaacagcgccagactaatccccgccggaagcaacagccagatactggcgtttcgttttaaccacaaccagggcagaaagcatccaataatttcacacagcgcagtagcaaaaaatagtaacgttgttttaatcatctttgtctcttattgacatcatgtatagttatagggcgacataatatcatcaatataaacaccctcctggtacgttttgcgtccgcagtggatggtgtagaatcacctttaatcattcatacagggaatgaattatgaaaatcactctcagcaaacgaatcggcctgctcgctattctgctgccttgcgcactggcattgagcacaactgttcatgccgaaactaacaaactggtgattgagtctggcgacagtgcacaaagccgccagcacgccgctatggaaaaagagcaatggaatgacacgcgcaatctgcgccagaaagtgaataaacgcactgaaaaagagtgggataaagccgacgccgcttttgataaccgcgataaatgtgagcaaagcgccaacatcaatgcctactgggagcccaatactttgcgctgcctggaccgtcgaactggccgcgttattaccccctaacctgttattgatttaaggaatgtaaggacacgttatgccaagcgcccacagtgttaagctacgcccgctggagcgtgaagatttacgctatgtacatcaactcgacaataacgccagtgtgatgcgttactggtttgaggaaccctacgaagcctttgttgaactctctgatctgtatgataagcatattcacgatcagagcgaacggcgctttgtggtggaatgtgacggcgaaaaagccggtctggtggagctggtggaaattaaccatgttcatcgccgcgcagaatttcagataattatctccccggagtatcaggggaaaggtctggcaacccgtgccgccaaattagcaatggactatggctttaccgttctcaatctctataagctgtatctgatcgttgataaagagaatgaaaaagcgattcacatttaccgcaagcttggctttagcgttgaaggtgaattgatgcacgagttctttattaatggtcaatatcgtaatgccattcgcatgtgtatattccagcatcagtatctggcagagcacaaaacaccgggtcagactctcctgaagccgaccgcacaataacattaataataatcgatcgtatttttgatggtgtaaacccgttcgacggcgggttttactccttcatcaacaatgattagctgacagtccaccggattagcgtgactgtcatattcacagctctgttttacattaccaacccgttgattattcagtaaagtaaccgctgtgtaatctaattttttgatcggatccgtacttggcgtggcgctgacagataatgttttgtcgttacttttcgtggttttacccagcggataaccctgatcatcatagcgatattccatctgcatttgtttgctgctggctttaatcacgaagccattatcatcggtttcccaactcaccccggcagaaggtaattctgctagctggcattttccctgtaaacgtactctcttctccagcgtctcggcatcacggtaataattggcgtccagtaccagagcgaccacggtattattttccagatccagtaattcgagactatcaaaacagccttcttcgctcaaagtcccagaaacacgtttcgtcacttcaccttgctcatccattaatgtctgagtgaaatcttttaccggaccacgcagcggatcaaaatcgaattcattagagaaactggccatctcaggggtaaaactaagtgttacctctgtgcggtcacatcctgtgaggaatatcgcgagtaagcatggtagtaatttgtatttcacaacagtcaccagagagtagagatgattctcaatcatagtagcaaatacagtactttacacgttaaatgctatgcttaaagaagttatcttcgcgtaaggagcttatgatgaaactcagtacctgctgtgccgcgcttctgctcgccctcgccagtcccgcggtactcgccgcgccgggatcctgtgagcgcatacagagcgatataagtcagcgcattatcaataatggcgtacccgaaagcagcttcacgttaagtattgtacccaatgaccaggttgatcagcctgattcccaggtcgtcggccattgcgctaatgatacgcataaaattctctatacccgcaccaccagcggtaacgtctctgctcccgcgcagtctagccaggatggcgcgcctgccgaaccgcagtaacacattatcgactgaacgccggatatgacaaatccggcgatttgaacatacaacataatcccaccttattactcatacccttctattgatatggattaataattcttaacccaaaatgggtagactccctctattgttagcgcgctaaatattcaatatataaacttttatataacgataaagaacagggagtgagttatgtccaaaaatgaacgaatggtgggcatcagccgcagaacactcgttaaatctaccgcgataggttctctggcgctggctgcaggcggtttttctttgccgtttaccctgcgcaatgcagcagcagcggtacaacaggcccgcgaaaaagtggtctggggtgcctgttccgtcaactgtggtagccgctgtgcacttcgtctacatgttaaagataatgaagtgacctgggtggaaactgacaataccggcagcgatgagtacggcaaccatcaggtacgcgcctgtttgcgcggtcgctccatccgccggcgtattaatcatcccgatcgcttgaattacccaatgaaacgcgtgggcaaacgcggcgaaggcaaattcgaacggattagctgggatgaagccctggatactatcgccagtagcctgaagaaaaccgtcgaacaatatggcaatgaggctgtatatattcagtactctagcgggatcgttggcggcaatatgacccgctctagcccaagtgccagcgcggtcaaacgcctgatgaactgctacggcggtagtctcaaccagtatggctcctacagcactgcgcaaatttcctgtgccatgccctacacctacggcagtaatgatggcaacagcaccacggatattgaaaacagcaagctggtcgtgatgtttggtaacaacccggcagaaacccgcatgagcggtggtggcatcacttatcttcttgaaaaagcgcgcgagaaaagcaacgccaaaatgattgttatcgatccgcgatataccgatacggctgccggtcgtgaagacgaatggctccctattcgcccgggcaccgatgccgcgctggttgcgggtattgcctgggtattgattaacgaaaatctcgttgatcaaccttttctcgataaatactgcgtcggctatgacgaaaaaaccttacccgcagatgcacccaaaaatggtcactataaagcctatattcttggtgaaggtgacgataaaacagcgaaaacgccgcagtgggctagccaaattaccggtatcccggaggaccgtatcatcaaactggcgcgtgaaattggcacagcaaaacccgcttatatctgccagggctgggggccacaacgccaggcaaacggcgaactgactgcacgcgctattgctatgttacctattttgacgggcaatgtcggcatcagcggcggaaatagtggcgcgcgtgaaagcacctataccattaccatagaacgcctgccggtgctggataatccggtcaaaacgagtatctcctgcttcagctggacagatgctatcgatcatggtccgcaaatgacggcaatccgcgacggcgtccgcggcaaagataaactggatgtgcccattaagttcatctggaactacgcgggaaataccctcgttaatcagcattctgacatcaacaaaacgcatgaaattctgcaggacgaaagcaaatgcgaaatgattgtggtcatcgaaaactttatgaccagtagcgcaaaatatgccgacattctgctgccagacctgatgaccgttgagcaggaagatattattcctaacgactacgccggtaacatgggatatctcattttcctccagcctgtcaccagcgaaaaattcgaacgcaaaccgatttactggatcctgagtgaagtcgcgaaacgtcttggacctgacgtctatcaaaagttcacagaaggtcgcacgcaggaacaatggttacaacatctgtacgccaaaatgcttgccaaagatccggcgttaccgtcttacgacgaactgaaaaaaatgggtatctataagcgtaaagatcccaatggccattttgtcgcctacaaagcatttcgtgacgaccccgaggcaaatccacttaaaacgccttccggtaagattgaaatttattccagcaggctggcggaaattgcccgtacctgggaactggaaaaagatgaagtgataagcccattgccagtttatgccagtacctttgaaggctggaactcccctgaacgtagaaccttcccactgcaactgtttggtttccattacaaatcccgtactcacagcacctacggcaatattgatctcctgaaggctgcctgccgtcaggaggtgtggatcaaccctatagatgcgcagaaacgtgggattgccaacggcgatatggtgcgggtgtttaaccatcgtggcgaagttcggctaccagccaaagtaacaccacgtattctccctggagttagcgctatgggccagggagcctggcacgaggccaatatgtctggcgataaaatcgaccatggcggctgtgtgaatacgctaaccactctgcgccctagtccactggcgaagggaaacccgcagcacactaatctggtcgagatcgaaaaaatataacccacgacaaccataaattctggcatgacattttgtttgaaaagcaataagtgagtaatgatgaaaatccataccacagaggcgctcatgaaggctgaaatcagccgtagaagtctgatgaaaacctccgcacttggcagtcttgcgctggcaagcagtgctttcactctgccattttcccaaatggtccgggcggcagaggctccggtagaagagaaagcggtctggagttcctgcaccgttaactgcgggagccgctgtctgttacgtttgcatgtgaaagatgacaccgtgtactgggtggagtctgatacgacaggtgacgacgtctacggtaatcatcaggttcgagcgtgtttacgcgggcgctctatccgccgacggatgaatcatcctgataggttgaaatatcccatgaagcgcgtcggcaagcgcggtgaaggtaaatttgaacggataagttgggacgaagccctggataccatcagtgataatcttcggcggatcctgaaagattacggcaatgaggctgtacatgtcctgtacggaacaggcgtagatggcggaaacatcaccaacagtaacgtcccgtaccgtctgatgaactcttgcggtggttttctcagtcgctatggcagctacagtaccgcacagatcagtgccgcaatgagttatatgttcggtgccaatgatggcaacagcccggatgatatcgccaatacgaaactggtcgttatgttcggaaataacccggcagaaacgcggatgagcggcggtggtgtcacttactacgtcgagcaagcccgcgaacgtagtaacgcacgcatgatcgtcatcgatccacgttataacgacactgctgccgggcgtgaagatgaatggctgcccattcgccctggcaccgatggcgcactggcctgtgcgattgcctgggtactgattactgaaaacatggtcgatcagccatttctcgacaaatattgtgttggttacgatgaaaaaacgctgcccgccaacgcaccacgtaacgcgcattataaagcctatattctgggcgaagggcctgacggcatagctaaaacgccggaatgggcagcaaaaatcaccagcatcccggcagaaaaaattatccagttggcacgagagatcggtagtgcaaaacctgcttatatttgtcagggttgggggccacaacgacattccaacggcgagcaaacatcccgcgctattgccatgctttccgttctcaccggcaacgtcggcataaacggcggcaacagtggcgtacgcgaaggtagctgggatctgggggtagaatggttcccgatgctcgagaatcctgttaaaacgcagatttccgtctttacatggacagatgccatcgaccatggtacggaaatgaccgcgacccgtgatggtgttcgtggaaaagaaaaactggatgtccccatcaagtttttatggtgctacgccagtaacacattgatcaatcaacatggcgacatcaatcacacccatgaggtgcttcaggatgacagcaagtgcgagatgattgttggcattgaccacttcatgacggccagcgctaagtattgcgatatcctgttgcccgacctgatgccaacagagcaagaagaccttatctctcatgaatctgcagggaatatgggctatgtgatcctcgcccaacccgcaaccagtgcaaaatttgaacgcaaacccatctactggatgctgagtgaagtcgccaaacgcttaggaccagacgtttatcaaacctttactgaaggtcgcagtcagcatgaatggatcaaatatctccatgcgaaaacgaaggaacgtaaccctgagatgcccgactacgaggagatgaaaacgaccgggatctttaagaaaaaatgcccggaagaacactacgtcgctttccgcgcattccgtgaagatccacaggcaaacccgttgaaaacacctagcgggaaaatcgaaatttattctgaacgactggcgaagattgcagatacctgggaattgaaaaaagatgaaattattcatccccttcctgcgtataccccaggttttgatggctgggacgatcccctgcggaaaacctatccactgcagttaacgggcttccattacaaagcgcgtacccactccagctacggcaatattgatgtgttacagcaggcctgcccacaagaggtgtggatcaaccccattgatgctcaggcacgcggtatccgtcatggcgataccgtgcgggtatttaacaataatggagaaatgctgattgccgcaaaagtgactccgcgtattctgcctggcgttaccgccatcgggcaaggtgcgtggcttaaagcggatatgtttggtgaccgggtcgatcacggcggcagtatcaatattctgacctctcaccgccctagtccgctggcaaagggaaacccgagccacagcaatcttgtccagatcgaaaaggtttaaggagtagcccatgaccacacaatatggattttttatcgattccagccgctgtactggctgtaaaacctgcgaactggcgtgcaaagattttaaagatcttggcccggaagtcagtttccgccgtatttatgaatacgctggcggcgactggcaggaagataatggcgtctggcaccagaacgtgttcgcttattatctctccatctcctgtaaccattgcgatgaccccgcatgtacaaaagtctgccccagcggcgcaatgcataagcgtgaagatggctttgtggtggttgatgaagatgtttgtatcggctgccgctactgccacatggcttgtccgtacggcgcgccacagtacaatgctgaaaaagggcacatgacgaagtgcgatggttgttatagccgcgtcgccgaggggaaacaacccatatgtgtcgaatcctgcccgctgcgtgcacttgagttcggtccaattgaagagctgcgccagaagcacggcactcttgctgccgtcgcgccactgccgcgcgcgcatttcacaaaacccaatatcgttatcaaacctaacgccaacagccgcccgaccggcgataccactggttatctggctaatccggaggaagtgtaaaatgggaaatggatggcatgagtggccactggttatctttaccgtattgggtcaatgcgtagtaggcgcgctgattgttagcggaattggctggttcgccgccaaaaatgacgcagaccgtcagcgtattgtccgtggcatgtttttcctctggctgttgatgggcgtcgggtttattgcctctgtcatgcacctgggaagcccactgcgggcgtttaactccctgaatcgaatcggagcttctggtctgagtaacgagattgctgccggttccatattttttgccgttggcggattatggtggctggtggcagtcatcggtaaaatgccgcaagcgttggggaaactctggttacttttcagcatggcgctcggcgtcattttcgtctggatgatgacctgcgtgtatcaaatcgacaccgtgccaacctggcataacggttacactacgctggctttcttcctgacggtattgttgagcggtccaatacttgctgccgcaattctgcgggcagctcgcgttacatttaataccacaccatttgccatcattagcgttctggcgctgatcgcttgtgccggggtgattgtgctgcaaggtttgtctctggcgtctattcacagttccgtgcaacaagccagcgcactggtaccagattacgcctccttacaggtctggcgtgtggtattgttatgcgcaggtcttggatgctggctttgcccgctcattcgtcgccgtgaacctcacgttgccggacttattctggggctaatcctcatacttggcggtgagatgatcgggcgtgtgctcttttatggcctgcacatgacagtaggaatggctattgcaggttaacaaattggtgcggggcaacccgcacatttcaggatgttaggaatgacccattttagtcagcaagataatttttctgtcgcggcgcgcgtgttgggcgcgctgttttattacgctccagagagtgcggaagccgcacctctggttgcggtactcaccagtgacggctgggaaactcagtggcctctaccagaagcgagtttagcgccgctggtgacggcttttcagacacagtgtgaagagactcacgcccaggcctggcagcgtttgtttgtcggcccgtgggcactgccgtctccgccgtgggggagcgtctggctggatcgcgaatctgtgctgtttggcgatagtacattggcacttcgtcagtggatgcgcgagaaaggcattcagtttgaaatgaagcaaaacgaaccggaagatcattttggtagtctgctgttgatggctgcgtggttggcggagaatggtcgccagacagaatgcgaagaattgctggcatggcacctttttccgtggagtacacgttttcttgatgtttttatcgaaaaagcagaacaccctttctaccgtgcactgggtgaactggctcgcttaacgctggcgcaatggcaaagtcaactgttaattcctgtcgcggttaaaccgctgtttcgataagatcaccgtaatattgccggatggtgacgattacgcgcaatccggcaataataggttacagtgtcacgtttttttatctcttaaagcacgcactgcttttgcggctggcctcttttgccgcaaaatagtcgcccgtgtttcattgcccatttctgctcatgcatcatctacacatctatccggatctgcgcactatgttccaccgtctgcttatcgcaacagtcgtcggtattctcgcggcctttgccgttgccgggtttcgtcatgcgatgctgctactggagtggttgttcctcaataatgactccggcagtctggtcaatgcagcgacaaacctttccccctggcgacggttgctaactccggcgctcggcggactggcggcgggtttgttgctgatgggctggcagaaatttacccaacaacgccctcatgcgccgaccgattatatggaagcgttgcaaaccgatggacagttcgattacgcagcaagcctggttaaaagccttgcctctctgctggtagtaaccagcggcagtgcaattggtcgcgaaggtgcgatgattcttttagctgcccttgccgcctcctgttttgcccaacgttttacgccacgccaggagtggaaattatggatcgcctgtggggccgcggcgggaatggctgcggcctatcgtgccccgcttgctggcagtttatttatagccgaagtgctgtttggcactatgatgttggcctctctcggcccggtgattatttccgccgtcgtggcattgctggttagcaatctgattaatcatagcgacgcgttactctacaacgtacaactcagtgtgacggttcaggctcgtgactatgcgctgattatcagtacaggtgtgctggcaggtctgtgcggaccactgttgttaacgttaatgaacgcctgtcatcgtggatttgtgagtctcaaacttgcgccgccctggcaactggcactaggcgggttgatcgtgggtctgctttccctgttcacacctgcagtgtggggcaacggctatagcaccgtacaatcctttttaaccgccccaccactgttaatgatcattgccgggatcttcctttgtaaactgtgtgccgtgctggcgagtagcggttccggcgcacccggtggggtctttacaccgacgctatttatcggtcttgccattggcatgttgtatggtcgtagcctgggattatggttccctgatggcgaagaaattacacttttactcggattgaccgggatggcgacactgttggcggcgaccacgcacgcgccgattatgagcacgttgatgatatgtgaaatgaccggggagtatcagctactccccggtttattgattgcctgcgtaattgcgagcgtaattagccggacgttacaccgtgactctatctaccgccagcacactgcgcagcatagctaagcggatgtattgccccagttcacgctgttcggcgcgcggcagataaggcagttcaccaatgagcggtgccggaagttttttacccagcacatcaatgatttccgcataatgcgccagtcctgggttgattcggttagccacccagccaatgagcggcagcccgtcgttggcgatcgcctgagctgttagcagtgcatggttaatgcaaccttcctgaataccgacaaccatcaacaccggcagttgttcctgcactacccattcagagagtggacgcaaatcattcatcagactgcgccagccgccagtcccttctaccacgacatgatcgactttttcggtcaggtttgccaggccgttactaatgagggtgtaattgattgggcaactgtgcgccacgctactttcttcttcgcttaacgcgataggattaactgcttcataaggcagttcgatggtactaacactctgcaacaccagggcatctttattacgcagcccttcgggtgtctctttgctccccttcgctacgggtttatatcccgcaaccgtttttccctgggaggctaacgcttgtagcaatgcgcgggaaaccaccgttttccctacagaagtgtctgtaccggtaataaagaaacgcttcagcatcactaactccaccgttatgcttcacaaatataaaccaggaaaataattaaccttgaaagtctaagttatgctttcctggcccaaattgagatagcgcaaattttggtagaacagttaaaaaatgttaaccctgcaacagacgaatcaacaaagaaccgttatacatcgcgtcttttaccagtgcagcgcctgccatcgtgccctggttagaaaactgagtactctcaacgctgatgtgctgactatacgcaggaagggcctgctgacggatgctgtcactgatgaccgggaagaggatatctgccgctttacttaacggactgccaatcagtattttttgtgggttaaataaattcaccatgatggcaagaatgcgcccgacatgcgcgcccaccccggtaatgatgtcttttgccagtagatcgccgcgcaatgccgcctgacacaaactgtccacggttaacggttgtccatgtaacatgctgctcatggattgattaagacgcagctgtgccagctcaagaatactgtccacgctggcgatggtttcgaggcagccgtgattcccgcaataacagcgtttcccatacgggtcgacctgtgtgtggcctatttccacgagactactgctgcctgcgtgtagcagatgaccatcggtaatgacgcccgcccccacgttgtgatcgataaccacctgaatcacatcgcgcgccccgcgactggcaccaaacaaggcctctgccatcgtccatgcgctgatatcatgctgaatataaaccggaacgccggtatgctgctccagcgcctcgccgagcggcatctcttttacatcctcgtagaacggcatgcgatgtacaataccattttccgtatcaataattcccggcaaggttatggcaatgctagttagacgctcaagttttttctggtggcggataaaaaactgatcgatatgggaaataatacgatccagcaatggcaagtcatcttttaacgccagttcctggctctcttccaccaccagtttgctgctcagatcgcgcagagcaaggaaaatctccccgcgactaatgcgcagagaaagatagtgccaggcttcagtttcaaccaccagccccaccgccggacggccacggttccccgcttctttgatttccagctcttgcaccaggtgtgcttcgagcatctcacggacaattttagtgatactggcaggagccagttgcgccagacgggaaagatcgatacggctgactggaccaagctgatcaatcaggcgataaaccgcgcccgcgttggtctgctttatttgatcaatgtgcccaggctggttttcagcaaccaccgcatactccctatattttcgcgctccgaaataatctgtaggctatggtgaagcacttcaatacgtgtcgtcaaatttttacttaggcatgtgattaacagcacatttttcgggctttttcgctgaaatttccctcacctgagagcattcagcagatgaatacgaaagttacgcgcagccggactttgttcatgatgtttcggccagaccaaccacatttcagaaaccgcatcctcttcagcaatcggcacccagcgcatttcgttgagctgaacacgtttaaaactcgcaggcaaaatactaacacccagaccggcggaaaccagaccgatgatggtcattgcctcgcccacctcctgagtgatgacgggcgtcaaatggtaacgtcgcatcagcccgagaatatcgtcatacagccctgtcccgacgtgcggatcaaaaaagacaaagggttctttcgccagttcagccagcgttacattcgggttatttgccaggggatgatcgtgcgggatcatcgccataagcggttcatggacgatgactgcgtgttcaaggctctccggtaacgctgtgttacgcagcaatcccatatccagcgttccttcaatgagcggagcgatttgctcgcgagtgttcatttcgcgggtttgtaaatggacatcaggataatcacggcgaaacaggcttaacgtatcggacaccgcccgaataaaaggagcgctgctagtaaaaccaatgcgcaactcccccgcttcaccctgatgcagcctttcagcgcgagcggcagcgtcatccaccatagacaggatttgccgactatctgcaagaaactgttttcctgctgccgtcagcaatacactgcgattggttcgtgccagcagtcgggcaccaatttgttgctccagcgcctgaatctgctgacttagcggcggttggctaatattcaggcgggcagcggcgcgcccgaaatgcagctcttccgcaacagcaacaaagtaacgcagatgacgaagttcaatattcatatttaaaacatcttatttgagattattaatatattagacagaacaattcgattttcctaccctatgtataagcctgatctacaggcatatttagcaaggatttcaagtgagccgtactacaactgttgatggcgctccggcaagcgacactgacaagcaaagcatttctcagccaaatcaatttattaaacgcggtacgccgcaatttatgcgcgtcaccctggcgctgttctctgccggactggcaacatttgcacttctctattgtgtgcagcctatccttccggtgcttagccaggagtttggcttaacccccgcgaacagtagtattagtctgtccatttccacggcgatgttggctattggtttgctgtttactggcccgctatccgatgccattggtcgcaaaccagtgatggtcacggcgctactgttggcctccatttgtacgttacttagcacaatgatgaccagctggcacggcattttgattatgcgcgccttgattgggcttagcttaagtggcgtggcagctgttggcatgacttatcttagcgaggaaatccatcccagtttcgtggcctttagtatggggttgtatatcagcggcaacagtattggcggcatgagcggacgcttaattagcggtgtcttcacggactttttcaactggcgaattgctctggcggcaatcggttgtttcgcgctggccagcgcgttgatgttctggaaaatcctccctgaaagtcgccattttcgcccgactagcctgcgccctaagacgttgtttatcaactttcgtctgcactggcgtgaccggggattaccgttattgttcgcagaaggctttttgctgatggggagcttcgtcacgctgtttaattacatcggctatcggttgatgctctccccctggcatgtcagtcaggccgtggttggcttattaagcctggcttatttgaccggtacatggagcagtcccaaagccggaaccatgaccacccgctatgggcgtggtccagtgatgttgtttagcacgggggttatgctgtttggtttactgatgaccttattcagcagcctgtggctgatctttgccggaatgttactcttcagtgcaggattcttcgcagcccacagtgtagccagcagctggatcggcccccgcgcaaaacgcgctaaaggccaggcctccagcctgtatctgttcagttactatctggggagcagtattgccgggacgctgggtggtgttttctggcataactatggctggaacggcgtcggcgcatttattgctctgatgctggtcattgctctgctggtcgggacgcgtttgcatcgtcgtctgcacgcctgaaaaataagtccggactgcggtaaatacccgtccggacttattgccagctcaaaccaacgttaatagccatcctaaaatagacgaagcgccagccaattcccgcagcgcgtctagcgtcatcaggattataagtacccaaataaacggattcattttgctgtgtgtcatttattactgatgcgcagttattctactgctttgtaagtagtaaaatagttaacccgatcaagactactattattggtagctaaatttcccttaagtcacaatacgttattatcaacgctgtaatttattcagcgtttgtacatatcgttacacgctgaaaccaaccactcacggaagtctgccattcccagggatatagttatttcaacggccccgcagtggggttaaatgaaaaaacaaattgagggtatgacaatgaaaaaagtattagctctggttgttgccgctgctatgggtctgtcttctgccgcctttgctgcagagactacgaccacacctgctccgactgcgacgaccaccaaagcagcgccggcgaaaactacacatcataaaaaacagcataaagcagcacctgcccagaaagcgcaggcggctaaaaagcatcataaaaatacgaaagctgaacagaaagcccctgaacaaaaagcgcaggcagcgaagaaacacgccaagaaacacagccatcagcaaccggcaaaacctgctgcacaacccgcagcgtaagttttcaacagtaatgctggcgcgccccctcgcgcctgaaaattacggtgctaagcgggtaacgtttagcaccgcctttagcggagggtagtatggtgggccgttatcgctttgagttcattctgatcatccttattttatgcgcactgattaccgcccgtttttatctttcctgattgtagttatctgattttactcccactttcatcccgtcccgtctatagtatttatgagggtttgcttttaataatcataattacccaccagagtgtgatatgcgtacaaccattgctgtagtgttgggtgcaattagtttgacgtctgcttttgtgtttgcagataaaccagacgttgccagaagcgcaaacgatgaggtcagcaccctgttttttggtcatgatgatcgtgtgccagtgaatgacacgacccaaagtccgtgggatgcggttgggcaactggaaacggccagcggcaatttatgtacggcgacgctgattgcacccaatctggcattaacggcaggacactgtttattgacacctccaaagggtaaagccgataaagcagtggcgctgcgttttgtgagtaataaaggtctttggcgctatgagatccacgacatagaaggccgcgttgatccgacactgggaaagcggttaaaagcagatggggatggttggattgtacctcccgcagccgcgccgtgggacttcggattgattgtgctacgtaatcccccttctggcattacgccgttgccgttatttgagggagataaagccgcgcttaccgccgcattaaaagcggcaggtcgtaaagtgactcaggcaggctaccctgaagatcatctcgatacgttgtacagtcatcaaaactgtgaagtgactggctgggcgcaaacgagcgtgatgagtcatcagtgcgataccttgccgggtgacagcggtagccctctgatgttgcataccgatgacggctggcaattaattggggtgcaaagtagcgctcctgccgcgaaagatcgctggcgcgccgataaccgggccatttctgttaccggttttcgcgacaagctggatcaactgagccaaaaataatgttcaaacgctgcccgacagcgcgggcagcgtcttcatcaggcaagtttcaccatgatcattccagccaacagcaagaccaggccaatccagcctttacgatttaaccgttgaccaaacaagatccaacctgcggctaacgtggcggcaataccaaacccgccccacaatgcataagcgacagacaagtcgatccctttaacggcttgagaaagcgcactaaaggcagccagcaccgccgccagggagagcaagccaaatattttgcgacgaaagccgtcagaaaatttcaaaaagacgttagcaacgatttccagcacgattgccaatgccagccaggcggcgtgaacccattcaaactgcgccatggttcacctccagttcaggtttacgcgctttacgggtaccactttttatcaacacaatcccggcgaccagggtggttaacccggcaattttcatcaggcttaaactttcgtcgaataacaaaacgctaaacaaggtaataaataaaataccgataccttcccacagcgcataagctacgcctaaggcgatttttttaacggcgaaagagagaaatatatagctcagagaaatcatcaccagcattaaaataaagccgccatttccctcactgacgctcgcccatttcatactcagcgtaccggtaatttctgtagcaatagccagacctaataaaatccaataaatatacattgtccttctcctgcaagagaattattttaattttcgcttaattcagcgaaaccaaagtaaagtggtcaagccccgcgcatagcgcaagctttggcagaagaaaggactaaagcgcgttgcgccagtgctgctcacctacgagcaagatagtggatgaggtacgaagatgggtaaatgtagaaaataacgtcctgaacaaattgtccataatattacaattatccgcagtgttgcttctcgtcatcgcggatgataattgtcctcggtagttgaacacgcctgatttgtatcatagcttaagaattaactcaaaatattttcacttctttacctgagcggtttgattttcgttatgatgacggagcgaaaaagacattattattagcaaaggaagaaaaaacggggacaagcatggcaaagccgatcatcacgctcaatggcctaaaaatcgtcattatgttgggaatgctggtcattattctctgcggtatccgttttgccgccgagatcatcgtgccgtttattctcgcattatttattgctgttattcttaacccgctggtgcaacacatggtccgctggcgtgtgccgcgtgtactggcggtgagcattttgatgaccatcatcgtgatggcgatggtgttgctattagcttatctgggttccgcgctcaacgagttgacgcggacgttaccgcaatatcgcaactctattatgacgccgctgcaagcgcttgaaccgttgttgcaacgcgtagggattgacgtcagtgttgaccagctggcgcattatattgatccgaacgcggcgatgacgttgctcaccaacttattgacgcagttatctaatgccatgagtagtatatttttattgctgctgacggtgctgtttatgctgctcgaagtgccacaattgcccggaaaatttcagcaaatgatggcgcgtccggttgaagggatggcggcgattcaacgtgcgattgacagtgtttctcattatctggtgctgaaaacagccatcagcatcatcaccggcctggtcgcctgggcgatgctcgccgcactcgatgttcgcttcgcttttgtctggggattgctggcctttgcgcttaattacatcccgaatattggtagtgtcctcgcggcaatcccccctatcgctcaggtactggtgtttaatggcttctacgaagcgttgctggtgctggcgggatatctgctgattaatctggtcttcggcaatattctggagccgcgtatcatggggcgtgggctggggctttccacattggtggtatttttgagcttgattttttggggatggttgttaggaccggtgggtatgctgctttccgtgccgttgacaattattgtcaaaattgcgcttgaacaaacagcgggaggtcaaagcatcgccgttctgttaagcgatctcaataaagagtgacggcctcagcagaggccgtcagggttacagagctttcaggattgcatccacgctggctttggcgtcaccaaacagcatgtgggtgttttccttgaagaacagcgggttttgcacaccagcatagccagtgttcatgctacgtttaaagacaatcacgttctgcgctttccacacttccagcacaggcataccagcaatcggactcttcggatcatcctgcgccgccgggttaaccgtatcgttagcaccaatcaccagtacggtatcggtatcagcaaagtcatcattgatctcgtccatttccagcacgatgtcatacggtacttttgcttcagccagcaatacgttcatatgtccaggcaaacgccccgcgaccgggtggataccgaaacgcacattaataccacgagcgcgcaatttctcagtaatttcagcgacaggatattgcgcctgcgcgactgccatgccgtaccccggagtaatgatcacactatgggagtttttcagcagttccgctgtctcttctgcggtgatttcgcggtgctcacccacttcctgatcatcgccagtagaagagccgtcggtgccgaaaccacccgcaataacgctgataaaggaacggttcatcgccttacacataatgtaagaaaggatagccccgctagaaccgaccagcgcaccggtcacaatcagcaggtcgttgctgagcataaagcccgcagccgcagccgcccagccggagtagctgttcagcatgctcaccaccactggcatatctgcaccaccgatggaggcgactaaatgccagccgaataccagcgcaattgcggtcattatcagcaatgccagcacttgcaggccgacgctgtccgtgcgaacaaatacaatcagcagcaggaaggaaacgaccagagccgccaggttcattttgtgacggtttggcagcatcaatggtttagagctaatcttgccacacagtttgccgaacgccaccacgctacccgtgaacgttaccgccccgatgaagataccgaggaacacttccgtcaggtgaatattgaccagaatcggtgccattcccgcgtcatgatgcagatagctgttaaagccaaccagcactgccgccagacccacgaagctatgcaggatcgccaccagttctggcatttcggtcatttcaactttcttcgccagacggataccaattgccccaccaatgaccatcgccagcaagatccagccaacattacccgtatccggtccaaaaatggttgcgattaacgcaatcgccatcccggcgataccgaagttgttaccctggcgagacgtttcatgtttgctaagaccggccagactgaagataaacaggatcgcggcaacaatgtatgcagctgtaactaatcctccagacatatgttaccccttaatttttgcggaacattttcagcatgcgctgagtcacggtgaagccaccgaaaatattaatgctggctataagcaccgcgataaaactaaggaagctaacccagccgccctggccaatctgcaacagtgctccgacaacaataatcccactaatcgcgttggtgacgctcatcaacggtgtatgcagcgcgtggcttacattccacaccacgtaataaccgacaacgcaggccagcgcgaaaacggtgaagtgcccaaggaattctttcggcgcaacgcttgccatccagccaaaaagaatgattgccagcgccatcaacgcgtatttacgccacggactgcaggtacatttttcctcagttttcacttccggtgccgctttttgtgccgcctgcggctgagcacttacctgaatcggcggtgccggccaggtaatttcgcccgcacggatcacggtcacgccgcgaatcaccacatcatcaaaatcaacagtgatattgccgtctttctctttgcacaacagtttcagcagattaacgaggtttgtgccgtaaagctgactggattgcgtcggcagacggcccggaagatcggtataaccaatcactttgacaccattttccgtagtgaagatttcacccggcacggtgtattcacagttgccgccgttttgggctgccaggtcgacaatcacactgcccgccttcatggagtcaaccatttcacgggtaattagcttcggcgctggtttgcctggaataagcgcggtggtgacaatgatatcgacctcttttgcctgggcggcaaagagttccatttccgctttgatgaacgcgtcgctcatcactttggcatagccatcgccgctgccagcttcctctttaaaatccagctcgaggaattccgcgcccatactttgaacttgttctttcacttccgggcgggtgtcgaatgcacgcacaatcgcgccgagactgtttgctgcgccaatggcggccagacctgcaacacccgcaccaatcaccatcacttttgccggtggcactttcccggccgcagtaatttgcccggtaaagaagcgcccaaattcatgtgccgcttcaacaatggcgcgataaccggcgatgttcgccatgctgcttagtgcgtccaggctttgtgcgcgactgatacgcggcacagagtccatcgccatcacggtcacgttacgttccgcaagtttttgcattaattccggattctgcgcaggccagataaaactcaccagcgttgtcccaggattcagtaacgcaatttcatcatctaacggcgcattgaccttcagaatgatctcactctgccagacgctattcccttctacaatttcagcgcccgcttgcacaaacgctttatcgtcaaaacttgccagttgacccgcgccgctctctaccgcgacggtaaaacccagtttcagcagctgttccactgtttttggcgttgctgcaacacgggtttcattggttaaccgttctcttggtatgccaattcgcatgatattcccttccatcggttttattgatgatggtttgcctgtgtcaggagccacacaagctgctcatgtacgagctaaatgttactccgttaaaataaattagtaacaaacgccctataacgtactgaaaattatgcctgtgatctagcgccaaaaatcagtatttcggcgtgaactcgcaaaatattaacgattcagccgtgatagtgggataaacaccttagaacgccggataaagactgataattgtcttcgacggtcgggtaaaacgagacatcgccccggcacgaatcactacttaacattaaattaacttatacaattcagttgcttcagtagtaatgatgctgatacggctgttttttaagcatagacggtcatttgagcaggattaaaattggcttaaggaatgtgatatgaaaaatgacgcagacagttacaccgtttaaatgcaataatcagccacgtttctcgttaataacaataccagtacctggtttgcgcaaggcgaaggattatttttatgaagcttaagaacaccctcctggcgagcgcactgctttctgctatggcattctccgttaacgcagcaacagaactgacaccggagcaagcggcagcggttaaaccttttgaccgtatagtggttaccggtcgttttaatgctattggcgaagcggtgaaagccgtttctcgtcgcgcagataaagaaggtgccgcctctttttatgttgtcgacacttctgattttggtaacagcggtaactggcgtgtggtcgctgacctctataaagccgatgctgaaaaagcagaagaaacaagtaatcgcgtaattaacggtgttgtcgaactgccgaaagatcaggctgttctgattgaaccgtttgacacggtcaccgtccagggcttctatcgtagccagccagaagtcaatgatgccatcaccaaagcggcaaaagcgaaaggtgcctactctttctacatcgttcgtcaaatcgatgccaaccagggcggcaaccagcgtattactgcattcatctataaaaaagatgctaagaaacgtatcgtccagagcccggatgtgatcccggcagattccgaagcaggacgtgcagctctggctgccggtggcgaagccgcgaagaaagttgagatcccgggtgttgcgactaccgcaagtccaagttctgaagtcggtcgcttctttgaaacccagagtagtaaaggcgggcgttacaccgtcacgctcccggatggcactaaagtcgaagaactgaacaaagcgaccgcagcgatgatggtcccgttcgacagcatcaaattctctggcaactacggcaacatgaccgaagtctcctatcaggttgcgaaacgtgccgcgaagaaaggtgctaagtattaccacatcacccgccagtggcaggaacgtggtaataacctgaccgtcagcgcagatctgtataaataactattcagttactcctataaggcggcttgatgccgcctttcgcatttttagtcacaaatttccccgcgaccattgcatgcagacacatctcttcgtaaaatcccgcgcttcagtggcaaactccatttttatgcgttttgccctaatatttattcttcttatcacgttttaatcactggatatcgatggaaaagaaactgggactgagcgcactcaccgcgctggtattaagcagtatgctgggcgcgggtgttttcagtctgccgcaaaatatggcggcagttgccagcccggcagcactgctcatcggctggggtattactggcgctggcattttattgctggcctttgccatgctgatcctcacgcgcattcgtcccgaacttgacggcggtatctttacctatgcccgcgaagggtttggcgagctaatcggcttttgttccgcatggggatactggctgtgcgcagtcatcgccaacgtctcctatctggtgatcgttttttccgcgttaagcttttttacggacacgccggaattgcgcctgtttggcgatggtaatacctggcaaagcatagtcggtgcaagcgctttattgtggattgttcactttttgatcctgcgcggggtgcaaaccgctgccagcattaacctggtggcgacactggcaaaattgttgccgctgggtctgtttgttgtgctggcgatgatgatgttcaaactggataccttcaagctcgacttcaccggacttgcacttggcgtacccgtttgggaacaggtgaaaaacaccatgctgatcaccctgtgggttttcattggtgtggaaggtgccgtggttgtttctgcgcgtgcgcgtaataaacgtgatgttggcaaagcgacactgctggcggttctctccgctctgggcgtttacttgctggtaacgctgcttagcctgggtgtggtggcacgtcctgaactggctgaaattcgtaacccgagtatggccggtctgatggtggaaatgatgggaccatggggcgaaatcatcatcgctgccggtttgatcgtttccgtttgcggcgcgtacttaagctggaccatcatggcagcagaagtaccgttcctggccgccactcataaagcattcccgcgcatttttgcgcgccagaacgcacaagctgcgccatccgccagtctgtggttgaccaacatctgcgtgcaaatttgtctggtactcatctggctgaccggttccgattacaacacgttgctgaccatcgccagtgaaatgattctggtgccctatttcctggtcggcgcgttcttgctgaaaatcgcaacccgtccactgcataaagcggtaggtgtcggtgcctgcatttatggcttatggttattgtacgcctctggtccaatgcacttgctgttatccgttgttctgtatgcaccggggctgctggttttcctgtacgcgcgcaaaacgcatacccatgataatgtactgaaccgtcaggaaatggtgctgattggcatgctgttaattgccagtgttccggcgacctggatgctggtgggataacgttcatcccatcgttggatagcaaaggagataacgatgggtaaaacccagcccttgccaatattaattactggcggaggtcgtcgcatcggcctcgccctcgcatggcatttcattaatcaaaagcaaccggtgattgtcagctatcggacacactatccagccattgatggactgattaatgcaggtgcgcagtgtattcaggctgattttagcaccaacgacggtgtgatggcgtttgccgatgaagtactaaaaagcacccatggtctgcgtgctattttgcataacgccagtgcgtggatggcggaaaaaccgggtgcgccactggccgacgtactggcttgcatgatgcagatccacgttaataccccatacctgctcaaccatgcgctggaaagattactgcgtgggcacggacacgccgccagcgatatcattcactttaccgattatgtggtggagcgcggtagcgacaaacatattgcgtatgctgcaagcaaagcggcactggataatatgacccgcagctttgcccgcaagctggcaccggaagtgaaagtgaattctattgcgccaagcctgatcctgtttaatgaacatgatgatgccgaatatcgacaacaggcgctgaataaaagtctgatgaaaaccgcgcctggcgagaaagaagtgatcgacctggtcgattacttacttaccagttgctttgtcaccggacgcagtttcccacttgatggcggtcgtcatctgcgttaatgcagctttatccagcatataatcaacacccatgcgcttatcccccaacacgcaacagaaccaacaaaagcggcgggcaagcgcatcattccggtgaaataccacaggctcaccaggtaaacaaaatagggaataatgctccacatactaaaaatgatggttgcgcgtaaggcttcaatgccgcgttcgctggcaacaatataatgcgcgataagcgcaaaggtcgggaaaagtggaatcagcccggcgatataataatttttcgtttttgctaaaacaccaatcaacagcactaccagcgcaccgagcgcggctttgattaccagccccatctttttaccttaacacttccataacaagtcatcagtagaatacctgatgaaaacttgtttagaaacgattgatagtaagtaaaaacagcgcggtgtattgtgacgtttttatatctaccgtgaatgttatgaacactatcgtatttgtggaagatgatgcggaagtcggtagtctgattgccgcgtacctggcaaaacatgatatgcaggttaccgtagagccgcgcggcgaccaggccgaagaaaccattttgcgagaaaatccggatttggtgttactcgacatcatgctaccaggcaaggacggcatgaccatttgtcgtgatttacgcgcaaagtggtctggaccgattgttcttctaacctctctcgatagcgatatgaaccacatcctggcactggaaatgggtgcctgcgactatattctcaaaacgacgccccctgctgttttgctagcgcgtttacgtttgcatttgcgtcagaatgagcaagccacactgaccaaaggtcttcaggaaacgtctctgactccctacaaagccctgcatttcggcacgttgaccatcgatcccatcaaccgcgtagtcaccctggctaacactgaaatcagcctcagcacagctgatttcgaattattgtgggaattagctacccatgccgggcaaatcatggaccgcgatgcattgctgaaaaatttacgcggcgtcagttatgacggactggatcgtagcgtggacgtggctattagccggttaagaaaaaaactgctcgataacgccgcagaaccttatcgcattaaaactgtgcgtaacaaaggctatctttttgcgcctcatgcatgggaataagcgatgaaaaaactgtttatccagttttacctgttattgtttgtctgcttccttgtgatgtctctgctggttgggctggtgtacaaatttaccgccgaacgcgcgggcaaacagagcctggatgatttgatgaacagtagcctgtatctgatgcgcagcgaattgcgtgagatccccccacacgactggggtaaaactctgaaagagatggatttaaatctctctttcgatctgcgtgtcgagccactgagtaaataccatcttgatgatatttccatgcaccgactgcgtggcggcgaaattgtcgccctggacgatcagtacacgtttttgcagcgtatcccgcgcagccactacgtgctggcagttggtcctgttccttatctttattatctccatcagatgcgattgctggatatcgccctgatcgcttttattgctatttccctcgcctttccggtgtttatctggatgcgtccgcactggcaggatatgttaaaactggaagcagcggcgcaacgatttggcgatgggcatctcaatgaacgtatccactttgatgagggtagcagctttgaacgacttggcgtcgcatttaaccagatggcggacaatatcaacgccttaattgccagcaaaaaacagcttattgacggtatcgctcacgaactgcgaacaccgttagtgcgcctgcgttatcgactggagatgagcgataacctgagcgccgccgaatcccaggcgttgaatcgtgatatcagtcaacttgaagctttaattgaagagctgctgacttatgcccgactcgatcgcccacaaaacgagcttcatcttagcgaaccagacctgccgttgtggctgagtacgcatctggcagatattcaggcagtaacgcccgataaaacggtacggataaaaacgctcgtgcaaggccattatgcggcgttggatatgcgcttaatggagcgcgtgctggataatttgctcaataacgccctgcggtactgccatagtacggttgaaaccagcctgctactgagcgggaatagagcgacattaattgttgaggatgatggcccagggattgccccagaaaaccgcgaacatatctttgaaccttttgttcgcctcgatcccagccgggatcgcagtaccggcggctgcgggctggggctggcaattgtccactctatagcactggcaatgggcggtacggttaattgtgacaccagcgaactgggtggtgcccgcttcagctttagctggccgttatggcataacatcccgcaatttacctctgcctgacactacgcgcacgatggtcaagtcaccacgactgtgctataaaataagtatgttgtaactaaagtggttaatattatggcgcgttacgatctcgtagaccgactcaacactacctttcgccagatggaacaagagctggccatatttgccgctcatcttgagcaacacaagctattggttgcccgcgtgttctctttgccggaggtaaaaaaagaggatgagcataatccgcttaatcgtattgaggtaaaacaacatctcggcaacgacgcgcagagcctggcgttgcgtcatttccgccatttatttattcaacaacagtccgaaaatcgcagcagcaaggccgctgtccgtctgcctggcgtgttgtgttaccaggtcgataaccttagccaagcagcgttggtcagtcatattcagcacatcaataaactcaagaccacgttcgagcatatcgtcacggttgaaagtgaactccccaccgcggcacgttttgaatgggtgcatcgtcatttgccggggctgatcacccttaatgcttaccgcacgctcaccgttctgcacgaccccgccactttacgctttggttgggctaataaacatatcattaagaatttacatcgtgatgaagtcctggcacagctggaaaaaagcctgaaaagtccacgcagtgtcgcaccgtggacgcgcgaggagtggcaaagaaaactggagcgagagtatcaggatatcgctgccctgccacagaacgcgaagttaaaaatcaaacgtccggtgaaggtgcagccgattgcccgcgtctggtacaaaggagatcaaaaacaagtccaacacgcctgccctacaccactgattgcactgattaatcgggataatggcgcgggcgtgccggacgttggtgagttgttaaattacgatgccgacaatgtgcagcaccgttataaacctcaggcgcagccgcttcgtttgatcattccacggctgcacctgtatgttgcagattaacgcccggctttcatactgccgaccatctgttctggccgtacccagctgtcaaactcggcttcgctaagataccccagcgcaagggccgcagcttttaaggtcagcccttctttatgcgcttttttggcgatctcggcggctttgtcataaccaatgtgggtgttaagcgcagtcaccagcatcaggctttcattgagtaattgattgattcgctcacgattcggttcaatacccactgcgcagtgtttgttaaaactttccatgccatctgccagcaagcgcacgctttgcaggaaattgtggatcaccattggacggaagacgttcagttcaaagttaccggaagcgccccccatgttgatcgccacgtcgttccccatcacctgacagcagagcatggttaatgcctcacactgtgttgggttcactttccccggcatgatactgctgcccggctcattttccgggatactgatttcaccaattccgcagcgcgggccagaggccagccagcggacatcattggcgattttcatcagactcgcagccaaccctttcaacgcgccgtgcgcctgaaccagggcatcacaggtcgccagcgcttcaaatttgttcggcgcggtaacaaacggtgcacaggtaatgactgccagttcatctgctacgcgacgcgcatactccggatgggtatttagtccagtacccaccgctgtaccgccaagagccagttccgctacgtgaggcaggctgtattcgatatgtttgagattatgctcgagcatcgctacccagccggaaatctcctgccccagcgttaacggcgtggcatcctgcaagtgagtacgaccaattttgacgatatcggcaaaagcacgggatttctcattcagtgtctgtgtcagggttttaagctgaggaatgagttgcttgcgcagcgccagcagcgccgcaacgtgcatcgccgtcggaaagacatcgttggaactttggcttttgttcacgtcgtcgttagggtgaactttacgttccatcccgcgcacaccgccgagtaattcactggcccggttagccagcacttcgttcatgttcatgttactttgcgtgccggagccggtctgccagatagccagcgggaattcgtcgtcatgctgtcctgccagtacttcatccgccgcctgacgaatggcgctcgctttctcttcagacaacaagcctaaatcttcattaacttttgccgctgcacgcttggttagcgccagcgcatgaatcagactggtgggcattttctccgtgctaatgcggaaatgctccaggctgcgttgagtttgtgcgccccacagcttatctgccgggacatcaatcgcccccatgctatctttttcgctgcgtactgtattcatgacctgctcctcacctgattaattttttctttctgttttgctttcgttaagcaacttttagctcacttattatttaccatttgataacaaatgtttggtctttcgtgccatgtaaaaaaaccgccccgaagggcggctctgtttatttcacacagcgggtgcattgtgtgagttgtatctgctggaagaagtcatttcctttatcatccacaaggataaacgccgggaaatcttccacttcaattttccagatggcttccattcccagttccggatattcaacacattccaggctcttaatacttccctgcgccaatacagcggccggaccaccgatactgccaaggtagaagccgccgtgttttttacaggcatccgtcacctgctggctgcggttgcctttcgccagcatgatcatacttccgccctgcgcttgcagttgatcgacataagaatccatccgtccggcggtcgttgggccaagagaaccggaggcataaccttccggcgttttggccggacccgcgtagtaaatcggatgatctttgatgtactgcggcagcccttcaccgttatccatccgctctttcagtttggcgtgagcaatatcacgaccgacgataatcgtgccgttaaggcttaagcgtgtagaaacgggatactggctcaactgtgcgaggatctctttcatcggacggttaaggtcaacgcgcaccgcttcgccttctcccgctttgcgcagctcttccgggatatatttgcctggattatgttccagtttttcgatccagatcccctgacggttgatcttcgctttgatattacggtcagcagagcaggagacgcccataccgaccgggcaggatgcgccgtgacgtggcaggcgaatcacgcggatgtcgtgagcgaagtatttaccaccaaactgcgcacccagaccaagattttgcgcttcgatcagcaattctttttccagttccacatcgcggaacgcctgaccgtgctcattcccttccgttggcagttcatcatagtatttcgcggaagccagtttcaccgttttaaggttcgtttctgcagaagttccaccaataacgaacgcaatatgatacggaggacaggccgccgtacccagcgtgcgcatcttctcaaccaggtaatttttcagtttccccggcgtcagtaacgctttggtttcctgatagagatacgtcttgtttgcgctaccaccacctttggcgatacagaggaatttgtattcgtcgccatcaacggcataaagatcgatctgcgctggcagattggtgccggtattcacttctttatacatatccagcggcgcgttttggctgtagcgcagattatcttcgatataagtgttatagacaccgcgcgccagcgccgcttcatcaccaccaccggtccatacacgctgcccttttttaccaacaataatcgcggtgccggtatcctgacaggttggcagaacgcctttcgccgcgatgtcggagttacgcaggaattgcagcgccacatatttatcattttcgctggcctccgggtcacgcagaatgtcggccacctgttgttggtgcgccggacgcagcatgaagctcgcatcatgaaacgcctggcgcgccaacagagttaacgcttcgggtgcgactttcaaaatctcctgcccttcaaattcagatacgctaacgtgttcgctggttagcaggtaatactcagtatcatcttttttgagtggaaaaggagcctgataatgaaagggtttgttactcattgttctctcacttactgcctggtttggttatgctctgggcgggtgttccgttgccctgttaaaagcgagtaacaatatcctacacacttttttaacaaaaactgagactagtacgactttttgcggctccaggttacttcccgtaggattcttgctttaatagtgggattaatttccacattaaaacagggattgatcatgcaaaaactcattaacagtgtgcaaaactatgcctggggcagcaaaacggcgttgactgaactttatggtatggaaaatccgtccagccagccgatggccgagctgtggatgggcgcacatccgaaaagcagtagtcgagtgcagaatgccgccggagatatcgttagtctgcgtgatgtgattgagagtgataaaagcactctgctcggagaggccgttgccaaacgctttggcgaactgcctttcctgttcaaagtattatgcgcagcacagccactctccattcaggttcatccaaacaaacacaattctgaaatcggttttgccaaagaaaatgccgcaggtatcccgatggatgccgccgagcgtaactataaagatcctaaccacaagccggagctggtttttgcgctgacgcctttccttgcgatgaacgcgtttcgtgaattttccgagattgtctccctactccagccggtcgcaggtgcacatccggcgattgctcactttttacaacagcctgatgccgaacgtttaagcgaactgttcgccagcctgttgaatatgcagggtgaagaaaaatcccgcgcgctggcgattttaaaaagcgccctcgatagccagcagggtgaaccgtggcaaacgattcgtttaatttctgaattttacccggaagacagcggtctgttctccccgctattgctgaatgtggtgaaattgaaccctggcgaagcgatgttcctgttcgctgaaacaccgcacgcttacctgcaaggcgtggcgctggaagtgatggcaaactccgataacgtgctgcgtgcgggtctgacgcctaaatacattgatattccggaactggttgccaatgtgaaattcgaagccaaaccggctaaccagttgttgacccagccggtgaaacaaggtgcagaactggacttcccgattccagtggatgattttgccttcagcctgcatgaccttagtgataaagaaaccaccattagccagcagagtgccgccattttgttctgcgtcgaaggcgatgcaacgttgtggaaaggttctcagcagttacagcttaaaccgggtgaaagtgcgtttattgccgccaacgaaagtccggtgactgtcaaaggccacggccgtttagcgcgtgtttacaacaagctgtaagagcttactgaaaaaattaacatctcttgctaagcttattaaaggcttataacaccttcaggcggccagtccgcctgatttcattttatggataatcattatgaataaaagcctggtagcggtaggcgtcattgttgcgctaggcgtagtctggacaggcggcgcatggtatacaggcaagaagattgaaacccatctcgaagacatggtcgcgcaggcgaacgcgcaactcaaactgacagctcctgaatccaacctggaagtgagttatcaaaactatcatcgcggcgtattcagcagccagttgcaactgttggtgaaacccattgccgggaaagaaaatccgtggattaaaagcggtcagagcgtcatcttcaacgaaagcgttgatcatggtcccttcccgcttgcccagcttaaaaaactgaacctgatcccgagcatggcaagtattcaaaccacgctggttaataacgaagtaagcaaaccactgtttgatatggcaaaaggtgaaacgccttttgagattaacagccgcattggttacagcggtgattccagttccgatattagcctcaagccactgaattacgagcaaaaggatgaaaaagtcgcctttagcggcggcgagttccagttaaatgctgacagagacggcaaagccatctccctttccggggaggcgcaaagtggtcggatagacgcagttaacgaatacaaccagaaagtgcagttgacctttaataatctgaaaaccgacggttccagcacgctggcaagttttggtgagcgtgtaggaaatcaaaaactgagtctggaaaaaatgaccattagtgtggaaggcaaagaactggcactgctggaaggcatggagatcagcggtaaaagcgatctggtcaatgacggtaaaacgatcaatagccaactggattacagcctaaacagcctgaaggtacagaatcaggatctgggcagcggcaagctgactttaaaagtcggccagattgatggtgaagcctggcatcagtttagccagcaatataacgcgcaaactcaggcgctgctggcacagccagaaattgccaacaaccccgaactttatcaggagaaagtgacggaagccttctttagcgccctgccgctgatgctgaaaggcgatccggtgattactatcgcgccgctaagctggaaaaacagtcagggtgaaagtgccctgaatctgagcctgttcctgaaagatccggcaacgactaaagaagcgccgcaaacgctggcgcaggaagtagatcgtagcgttaaatctctggatgcgaaactgaccattccggtggatatggcaactgagtttatgactcaggtagcgaagctggaaggttatcaggaagatcaagcgaaaaaactggcgaaacagcaagttgaaggtgcaagtgcaatggggcagatgttccgtctgaccaccttgcaggacaataccatcaccaccagcctgcaatatgctaacggtcagataacgttaaatgggcagaaaatgagcttagaagattttgttggcatgtttgcgatgccagctcttaacgttccggctgtaccggcaattccgcagcagtaattcacggccaaaacgccggagaattttcactccggcgttttcatctgaaaacaaaccagagattgcctgatgcgctacgcttatcaggcctaccttttcctgcaacactttgaatttatgagtttttgtaggctggataaggcgtttacgccgcatccggcataaaaaacgcgcactttgtcaacaatctgaaacgccggagatttttctctccggcgttattttttacttcagcataaagtcatactgaatactcattttcacatcccagtaattcaggcgatcgcccagcgtactgccatcgcgcttttcccgccctttatcggcagcaagaaagaaattcatcccttgtaacggcccttcgctgacccgatagttcataccacctaagatacccgtgccttcaatccgcacatctcgtttactggattcatagccgcgagtcacaatcggtgcaaatgtcagcgtaaattgcggcgttaaacgatagttgacgcccaattgccaggactgcattccttcacggttacgatcaagacttaaactaaagggatagccaatgtcggtatccaccacggcaccattcattgcatggcgcaaataaccaccactgccaaatacacttccccacggcgcattccaggtcaattgtccactaaccaacgccgtttcattgggctggctggtattacgacttaaaccttcgagctgcgcgtaaaagccgagcaactcccctttcaacgtataattcgggtcgagcggtatgcttttctcgagaatactttgtatctgattggaaacatctttctgtacgcttgcccccagagaatagcgactggtatcatcatgccaactggcggctaaaaaagaacgtgcgcgatgtttatcgtattttcccgtctggctgttatacaccccttcatcacgaataccggttgtactatcagtccataaaaatactcgactacgccacattccccacagatcaatatttggtgttaaagcccaataacctaatgctccttcagaaactgtcggtaatgtacgttggctactgccagccattaacggaatacgataaggtaagctaccataactataatccgtcccgaagcgacctaatttaagcaggctattttcactgggttttatttttactgcccccagggcaaagccaaaacttttatcaccatcaagataccaccgggtactcatatcagcacgagcacctaatttataaacataatacgccccgccttcaacgccaataatattggaataataaccactattgaaatcgagcaatcctccctgtacccatgcgtaaatatctcttcccgcgccagcactgggcttatccgccctgcgcaattcgtttttcagtctgatgcgtagtcccgcttcatcgtcagccagttgcgccgcataagcagaggtaaggccagaggcagccgtcaggcaaataacggccatggccactatttttctcatagttgcacctttgatgttctgattatttttattgaatattaattagtgatatcgctgattaattgctgctgcacttttttacgattatcaatttcaaccacgatttctttgaattttttatccgtgagcggataaaaccagataataacgaatgccagtagcataaatccgcaaggtactaaggcaatacttgtgcggatgcccataataacttccggcgtttgcacctgattggcgatatatccgcttaaccccaaaataaaggcaggaatactacctccgattgcctgaccgcatttacgggtaaaactgaatagactataggtgagcccttcaattcgcacgccggtcaggtattcaccgtattctacggtatcagcttccagcgcccacatcacggtcatggtaacgccctgaccaatactagcgatggccaacgcaaccaacgccaccggcagactccagacggaaacccagaagaacagcagataaccgcaggttcccagcaaagcgccaatcaggaaggtattctttttaccgatcctcgcgaccatccccggcaccagcggtgcgcttgccacagtaccaaccaggttttgcaccagtaccagcacagtgaacagcccggtatcatttaacacatagcgcacgtagaacaagctgctggcgctgaccgcaaaggtgctaatcagcacacacagcgcaccgatgcacaacataaacagcgggcgattccgtttcagggtttgcagactgatattcaaactcggctgcgcaacgatacgtaccacattctcacgcgtgcttttgaagcagatgaagtaaagcaccattccggcaatcgccagcacaattgtccagaaatggtatacgctcaccatctcttccgggctggagttcttaatgctcggtcctatcagaaatgccaggcagacaaaggtcaaactagcggcaatcccacgagccgcgcccagacgggcgcgggattgtggttgttgggtcatcgcggtagcaagactaccataaggaatattcaccaggctgtagcaaagcccgaggcccatgtaggtcaaatatgcatacaccactttgctaccatggctccagtcggtcagcacccagaataccagcacgctgaagatcattaacggcgcagtaccgaagagtaaaaacgggcggaattttccccagcgggtattcacactgtccaccactcgtccggcaaagacgtcggcgaaggcatcgaatacccgcaccagtaacagcatggtgcccgccgcagcggcaccgacgccagcgacgtcggtgtagtaactcaacaggaagagcgcccccattgcgaaggcgaagttattggcgacgtcaccgaggctgtagccgacgatggtgcgccaggagagttgttgattcattgtttgcctccctgctgcggtttttcaccgaagttcatgccagtccagcgtttttgcagcagaaaagccgcgctcttcggtttgcggtcgcgagtgaagatccctttcttgttaccgccaacgcgcaatatgccttggctggtcgcaaaatcggcgaaattccatacctgttcaccgacgacggcgctgacgcgatcaaagacgcggtgatacatatccagccatgcacactgatactcttcactccacatgtcggtgtacatactgtgcagcccggctaacgtatccacgccgtattcggtgatgataatcggctgatgcagtttctcctgccaggccagaagttctttttccagtaccttctctgccgtttccaaatcgccgctttggacataccatccgtaataacggttcaggcacagcacatcaaagagatcgctgatggtatcggtgtgagcgtcgcagaacattacattgacgcaggtgatcggacgcgtcgggtcgagtttacgcgttgcttccgccagtggcgcgaaatattcccgtgcaccttgcggacgggtatccggttcgttggcaatactccacatcaccacgcttgggtggtttttgtcacgcgctatcagctctttaatcgcctgtaagtgcgcttgctgagtttccccgttgactgcctcttcgctgtacagttctttcggcttgttgcccgcttcgaaaccaatgcctaaagagaggttaaagccgacagcagcagtttcatcaatcaccacgatgccatgttcatctgcccagtcgagcatctcttcagcgtaagggtaatggctggtacggtaggagttggccccaatccagtccattaatgcgtggtcgtgcaccatcagcacgttatcgaatcctttgccacgcaagtccgcatcttcatgacgaccaaagccagtaaagtagaacggtttgtggttaatcaggaactgttcgcccttcactgccacactccggatgccgacgcgaagcgggtagatatcacactctgtctggcttttggctgtgacgcacagttcatagagataaccttcacccggttgccagaggtgcggattcaccacttgcaaagtcccgctagtgccttgtccagttgcaaccacctgttgatccgcatcacgcagttcaacgctgacatcaccattggccaccacctgccagtcaacagacgcgtggttacagtcttgcgcgacatgcgtcaccacggtgatatcgtccacccaggtgttcggcgtggtgtagagcattacgctgcgatggatcccggcatagttaaagaaatcatggaagtaagactgctttttcttgccgttttcgtcggtaatcaccattcccggcgggatagtctgccagttcagttcgttgttcacacaaacggtgatacgtacacttttcccggcaataacatacggcgtgacatcggcttcaaatggcgtatagccgccctgatgctccatcacttcctgattattgacccacactttgccgtaatgagtgaccgcatcgaaacgcagcacgatacgctggcctgcccaacctttcggtataaagacttcgcgctgataccagacgttgcccgcataattacgaatatctgcatcggcgaactgatcgttaaaactgcctggcacagcaattgcccggctttcttgtaacgcgctttcccaccaacgctgatcaattccacagttttcgcgatccagactgaatgcccacaggccgtcgagttttttgatttcacgggttggggtttctacaggacgtaacataagggactcctcattaagataataatactggtcaacctttaatctgattagttaaccaattctgtgttgcacacagttatctgtgagaaacccatggaagagaaatggaaataaaaagaactgacaccgcgatcaaaaaaccaaaaactgcaatacccacagcgtgatatagatcgcattaatctttaaaacagcgttgacagaagccataaaataagcaaccgaacgttcgttcgagcgtattgggaacgataaactctcatgacatatggctacagtgaatattttggggggaattctccgaagccgggaaggataatttttgcacagagaaattacgatatgaaacgcgggcacagttatcaccagcccgccgaaaaagagagagaatcaggatgcggttaagataccgccaatcatcgcgcgtaatccctgagcaaagctcgcttcacgcgccaggtcttccgcttcgatatcggccagtacaccgtaggtcagatccagcagtaaacgactagtcattgccgtgttgatgtctgggcttatctcgcctttttgctgggcatcacgcatccgctgggcaacaaattccgtgatcgtcatatgcttatttttaagcatggcggcgacctgtgggttacgcatcccttccgccataatttcaaccaccagcgcccgttgtccaaaggcttcatgggtgagagagacaatggactcgaccatatagtcaacgaaatgaatcccttcaatcggttcccggaaacgggccagcgccctctcctggtcctgtaagataatcgcctgaatcaaggcttctttggagatgaaatggtgatagagcgtcccgggactaatggcgcaagatttacagatggctttcatgctggcactgtgaaatccattttcactaaaaatctctctggcagcattgaggatccgggtccgtgtcggttgtgcttcagtctgcatgttatccatcattaaaccattatagttagcgtgaataactagtttaccgcgttgtcaggtgagcgcctatcattgctgttgaatagtgcgaaggcacactctattcgtatacttttcactctgaaattggttaaccaatagccgtgatttggctgccagttatttagcagagacgttgatgagtttatcccggtaaacaacacgcacggttgtttaccggtccgttagtgtattaattgagctcctgtaccccaccaccggagacggtgagaatttgtccgcttacccagctcgcagcagggctgcaaaggaacagcgctgcgttagcaatatcttgcggttggcccagacgtctgatcggcgtgtgctgtaacattttttgttcaatttctggtgtaataacggatttcagggcatcggttaatattgcccccggcgcaatgccatttacccgaatatttttttcacccaggtcaaacgccatatttctgaccagatgactggccgcagctttagaacttgcataggaagtcatgtttatatttttattttctgccgccatagaagtgatggtcagaataacgccaccgccatttttttccatttctggcgcaacaagttgactcagatggaaaaaagaaaacacattcagttcataagcacggcgaaaatccgccattggcatatcaaacggtttaggtccaccgccaccggcgttgttaaccagaatatcaactttacccagcttactgatagcaaagtctgccagtgcagagagttcctgttcggaagtaatatcacaacggcaggcaaatgcctgaccacccagttgttgaatttcgtctacaacatggttagctgcgtcggcgttaatatcactgaccaccacagatgcgccagctgtcgcgaatgtaatggcgatttctttaccaatacctgcacccgcacctgtgatgatggcgcattttccgtcgagtctcaggttgtcagaattaaacacataaacctcctgtgaacttcagtaaaaataaaaggcaccgcctgtgtgccacattttttatcattaaccttgaggaaaggacactaccaggtatagcagataaagagaggattatttcgctgcaatgagccgggcgggaataataagattgcgactatgcgtctcttcatgggtgattttttgcatcatgcgatccgcaagtgtgataccaagttcccgcgctggcgtgctggcccaggtaacaggtatatcatcaagtgtggttggtgtcgcatcggtaaatgccgccaggctaacctgttgctcaaagtaacgatcgactccgctttccccgctttgccgccctgctttgagcaaaccaaaccatgcccccatcgcaatagtttcgttatagcaaaccacggcactgatggtcgggttatgacgtaaaagcgccgtgatagcttccgcggcttgcttctggctggaagtgcactccaacacccaatcgctatgaaacggcaggccaaattttagtagagttgcacaatagcccccaacccgttctgcacgggttaaactggaactttgccctcccagccaggcgatccgctgatgcccattgcgaatgagatgctccgtcaacaactgtgcagcctgcatgttgtccgggcgaaccgtatcaacatcatcaagataactggcacgggaagcgaaaatcaccgggatagctttttcttctgccatccgtcgcaggtcatcgctacttcctgcagctccggcaattaccacaccatcgacaccctgattcagtaacagactaaaccgctgtgccagctgctcaccgtctttaccgccgtgaagcaaaaaaaccatccgtccctgcgcttccagagcttccgtcaatccggccgtcaattcggcgtaaaacggcgcagataaatcacggacgatcaaaccaatgacgccgctttgcccgccgcgcagcgcgctcgcctggcgattgcgcacaaatcccagctcttcaatggcggcgttaacgcgttctcctgtggcggtagagattcgccctttgccactaagcaccaggctaacggtacttacgctcacgcccgcagccagcgcaacatcatgaatggttatttttttggcggtagccatgcagatgacctactccctgattatgtgacagataaaacgttttaccttttatttatcttatacccgctattatcgttgcgtaatgtgatttatgcctcactaaaatttgataaaacgttttatcttctcgcgcaatttactgaatccagattgttctctacgaggagtcgttttatgacggcgaaaacagcaccgaaagtcacgctgtgggagttcttccagcagttaggcaaaaccttcatgttacccgtggcattattgagcttctgcggcattatgctcggcattggtagttctcttagcagccatgatgtcataaccctgatcccggtcctgggcaaccccgtgttgcaggctatctttacctggatgagtaagattggcagctttgcttttagtttcctgcctgtcatgttctgtatcgccatcccgctgggcctggcacgcgaaaataaaggcgtagcggcattcgctggcttcatcggttatgcggtaatgaacctcgcggtaaacttctggttgaccaataaaggcattctgccaaccacggatgccgcggttctgaaagccaataacatccagagcattcttgggatccagagcatcgataccgggatcctcggtgcggtgatcgccggtattatcgtctggatgctgcatgagcgtttccataatatccgcctgccggatgcgctggcattcttcggcggtacgcgcttcgtaccaattatctccagcctggtgatgggccttgtcggcctggtgattccattagtctggccgattttcgccatgggtattagcggcttgggccatatgataaacagcgcgggtgatttcggaccgatgctgtttggtaccggtgaacgtctgctgttgccgtttggtctgcatcacattctggtggcattaattcgctttaccgacgcaggcggcacgcaggaagtctgcggtcaaaccgtcagcggcgcactgaccatcttccaggcgcaattgagttgcccgaccactcacggtttttctgaaagcgccacgcgtttccttagccaaggtaaaatgcctgcgtttctcggcggtctgccaggtgcagcgttagctatgtatcactgcgcgcgcccggaaaatcgccataaaattaaaggtctgctgatttctggcctgatcgcctgcgtcgttggcggcactaccgaaccgctggaattcctgttcctgttcgtagcgccagttctgtatgtcatccacgcgctgttaaccggcctcggcttcaccgtcatgtctgtgctcggcgtcaccatcggtaataccgacggcaatatcatcgacttcgtggtgttcggtattttgcatggtctgagtaccaagtggtacatggtgccagtggtggcggcaatctggtttgtcgtttactacgtcatcttccgtttcgctatcacccgcttcaatctgaaaaccccggggcgcgatagcgaagttgccagcagtatcgaaaaagccgttgccggtgcgccgggtaaaagtggttacaacgttcctgcaatcctcgaagcattaggcggtgccgacaatattgtcagcctcgataactgcattacccgtctgcgtttgtctgtgaaagatatgagccttgttaatgtgcaggcactgaaggacaatcgggcaattggcgtagtacaacttaatcaacataacctgcaggttgttatcgggccacaagttcagagtgtaaaagatgaaatggccggtctgatgcatactgtccaggcataaggataagatatgttcgattttagtaaggtcgtggatcgtcatggcacatggtgtacacagtgggattatgtcgctgaccgtttcggcactgctgacctgttaccgttcacgattagtgacatggattttgccactgccccctgcattatcgaggcgctgaatcagcgcctgatgcacggcgtatttggctacagccgctggaaaaacgatgagtttctcgcggctattgcccactggttttccacccagcattacaccgccatcgattctcagacggtggtgtatggcccttctgtcatctatatggttagtaaactgattcgtcagtggtctgaaacaggtgaaggcgtggtgatccacacacccgcctatgacgcattttacaaggccattgaaggtaaccagcgcacagtaatgcccgttgctttagagaagcaggctgatggttggttttgcgatatgggcaagttggaagccgtgttggcgaaaccagaatgtaaaattatgctcctgtgtagcccacagaatcctaccgggaaagtgtggacgtgcgatgagctggagatcatggctgacctgtgcgagcgtcatggtgtgcgggttatttccgatgaaatccatatggatatggtttggggcgagcagccgcatattccctggagtaatgtggctcgcggagactgggcgttgctaacgagcggcagcaaaagtttcaatattcccgccctgaccggtgcttacgggattatagaaaatagcagtagccgcgatgcctatttaagcgcactgaaaggccgtgatgggctttcttcccctagcgtactggcgttaactgcccatatcgccgcctatcagcaaggcgcgccgtggctggatgccttacgcatctatctgaaagataacctgacgtatatcgcagataaaatgaacgccgcgtttcctgaactcaactggcagatcccacaatccacttatctggcatggcttgatttacgtccgttgaatattgacgacaacgcgttgcaaaaagcacttatcgaacaagaaaaagtcgcgatcatgccggggtatacctacggtgaagaaggtcgtggttttgtccgtctcaatgccggctgcccacgtagcaaactggaaaaaggtgtggctggattaattaacgccatccgcgctgttcgttaaccccaattgcgcaacgtaaaaaatcgttgcgcaatcgtggatttttaccctgctttgtttttataatggtgcgcacttttatatccagaaaaagagtgcgaccatgattgataccaccctgccattaactgatatccatcgccaccttgatggcaacattcgtccccagaccattcttgaacttggccgccagtataatatcagccttcctgcacaatccctggaaacactgattccccacgttcaggtcattgccaacgaacccgatctggtgagctttctgaccaaacttgactggggcgttaaagttctcgcctctcttgatgcctgtcgccgcgtggcatttgaaaacattgaagatgcagcccgtcacggcctgcactatgtcgagctgcgttttagtccaggctacatggcaatggcacatcagctgcctgtagcgggtgttgtcgaagcggtgatcgatggcgtacgtgaaggttgccgcacctttggtgtgcaggcgaagcttatcggcattatgagccggaccttcggcgaagccgcctgtcagcaagagctggaggcctttttagcccaccgtgaccagattaccgcacttgatttagccggtgatgaacttggtttcccgggaagtctgttcctttctcacttcaaccgcgcgcgtgatgcgggctggcatattaccgtccatgcaggcgaagctgccgggccggaaagcatctggcaggcgattcgtgaactgggtgcggagcgtattggacatggcgtaaaagccattgaagatcgggcgctgatggattttctcgccgagcaacaaattggtattgaatcctgtctgacctccaatattcagaccagcaccgtagcagagctggctgcacatccgctgaaaacgttccttgagcatggcattcgtgccagcattaacactgacgatcccggcgtacagggagtggatatcattcacgaatataccgttgccgcgccagctgctgggttatcccgcgagcaaatccgccaggcacagattaatggtctggaaatggctttcctcagcgctgaggaaaaacgcgcactgcgagaaaaagtcgccgcgaagtaacaaaatggatggtgcaaatgcaccatccatttttcatgcaaggcacaaagtcgcgcgatgtttggcggattcgatgcccagctcaatcaactccattacctggattgcctggcttgccggaaccggattttcaccatcgccatttaacgcatcacgaatagccgcatagtaagccggataattcccaggcaccgtcaacagcgtttcttcgacacgttcctcaccttccacgcgggtaagtacgccatcacgcatatcgtagccccagtcttcctgcggtagacgctcgccatttttcagacgttcttcctgtggatcgaggccatatttcacataactgcctcgggatccatgcacgatataccgtgcactctcagcggctgccagcatggtaccgtgtaaaatgactcgccgctgtggataggacaagatggcgtggaaataatcggtgctctgcgctccgggccgtaactgtgccaaatctaccgtcatgctgaccggtaaaccaaaaagcgtaatggcctgatcaagaagatgtggtgctaaatcgtaccagataccgctgcctgggccgccctgttcacgccaacgatcgcgcacctgcggacggaagcggtcaaaatgagactcaaagtaagcaacttcacccagcacgccttccgcgagtaaaccttttagcgtcaagaaatcgctatcccagcgacggttatggaatacagacagcacacgccccaggctttttgccagcgcatccagctctcgcgcttgactcagtgtcacggtaaagggtttatcaacgaccacatgtttacccgcctcaagcgccgctttggctaacgggaaatgggtatcgttgggtgtaggaatgacaatcaggtctatgttgggatcgttaaacagatgcttcggctcagagacaaccgtaaccgttggccagtcggcttttacttttgtttcatcactgctggagattaccgccagttcctgcccgggcgtgcccgcaatcaggggcgcatggaaggttttgctcgcataaccatacccaatcaacccaacacggatgttgtcgctcatgtcattgcctctcattgaagtatgatggctatttgacactatcctttacccacgctcaacagtttaataacctgccagcaataagggatgttgtttaacttaagtcaaaaaaatagcgaattttccaacgacaaaagctaaatatcgcaaaaacctcagtaaaaatcttgctggagctattattgctaagtaacatttaccccctgaagttaatggatcaatcaagagagatgtgggctgtaatgaatcgtcttattgaattaacaggttggatcgttcttgtcgttagtgtcattcttcttggcgtggcgagtcacattgacaactatcagccacctgaacagagtgctagcgtacaacacaagtaagctctgcacttgtggagcgacatgctgcccgtccgggtgcatgttttcacttgtcggatattaaaccaggaatttattatcttgttcgatgttgttggtgattgtcagggatagtaaagcgcgttactcttttcagagcagtttttcatccctgaatatttgccatcagcgcattcttattattgtaataacacaagcgttcacttttggtgaaattttatcatcactaataatacctacccctttggtattaattattttatggaccttttatgactgttcaggactacttattaaaatttcgcaaaatcagtagtctcgaaagtctggaaaaactctacgaccatcttaattacaccctgacggacgatcaggaactgatcaatatgtatcgtgctgccgatcaccgtcgcgcagagctggtttctggcgggcgtttgtttgacctcggccaggtaccgaagtccgtctggcactatgtccaataaagaaagtagcgatcggttataaaagccttataataacgcccctaaaattagatttgcctgtttgcgtcgctattctggagaacctatgaccaccacaacgccacaacgtattggaggctggttgcttggcccgttggcctggcttttagtcgctctgttgagtacgacgctggcgttgttgctgtataccgctgcgttatcttctccgcaaacatttcaaacgctcggcggacaagcactgacgacacaaatcttatggggcgtttcttttattaccgctatcgccttgtggtattacacactgtggttgaccatcgctttctttaaacgtcggcgttgtgttcctaaacactatattatctggctgcttatttccgtattgctggcagtaaaagcattcgcttttagtcccgtggaagatggcatagccgttcgccagttgctgtttactttgttggcaaccgcattgatcgtcccctatttcaaacgcagcagccgggtaaaagcgacgtttgtgaatccgtaataaccttacagttaacctgttgtcgcctgctctggattaacggataataggcggcttttttatttcaggccgaaaaatgactgactacctgttactgtttgtcggaactgtactggtcaataactttgtactggtcaagtttctcggtctctgtccgtttatgggggtttccaaaaaactggaaaccgcgatgggcatggggctggcaacaacgtttgtgatgacgctggcgtctatttgcgcctggcttatcgatacgtggattttgatcccacttaatctgatttacctgcgcaccctggcatttattctggtgattgctgtggtcgtgcagttcaccgagatggtggtgcgcaaaaccagcccggtgctttaccgtctgctggggatttttttgccgcttatcaccaccaactgtgcagtgctcggcgtggcgttgctgaatatcaatctcgggcacaatttcttgcagagcgcgctgtacggtttttccgccgctgtcggtttcagcctggtgatggtgctcttcgccgccatccgcgaacgccttgctgtggctgatgtcccggcaccttttcgcggtaatgccattgcgttaattaccgcaggtcttatgtctctggcctttatgggctttagtggtttggtgaagttgtaatgaatgctatctggattgccgttgccgccgtgagcctgctgggcctggcgtttggcgccattctgggttatgcctcccgccgttttgcggtggaagacgatccggtcgttgagaaaattgacgaaatcttaccgcagagccagtgtggtcagtgcggttatcccggctgtcgcccctacgcggaagccatcagctgtaacggtgaaaaaatcaaccgttgcgccccaggtggcgaagctgtgatgctaaaaattgccgagttgcttaatgtcgagccgcagccgctggatggcgaagcgcaagagataacgcctgcgcggatggtggcggttattgatgaaaataactgtattggctgcactaaatgtattcaggcgtgtccggtagacgccatcgttggcgctacccgtgccatgcatacggtaatgagtgatctctgtacgggctgcaatttatgtgttgatccgtgcccgacgcactgcatcagcttgcaaccggtcgcagaaacacctgactcctggaaatgggatctgaacaccattcccgtgcgtatcattcccgtggaacaccatgcttaagttattctctgcattcagaaaaaataaaatctgggatttcaacggcggcatccatccaccggagatgaaaacccagtccaacggtacacccctgcgccaggtacccctggcgcagcgttttgttattccactgaaacagcatattggcgctgaaggtgagttgtgcgttagcgtcggcgataaagtattgcgcggccagccgcttacccgtggtcgcggcaaaatgctgcctgttcacgcgcccaccagcggtaccgttacggctattgcgccccactctacggctcatcctagtgctttagctgaattaagcgtgattattgatgccgatggtgaagactgctggatcccgcgcgacggctgggccgattatcgcactcgcagtcgcgaagagttaatcgagcgcatacatcagtttggtgttgccgggctgggcggtgcaggattcccgacaggcgttaaattgcagggtggcggagataagattgaaacgttgattatcaacgcggctgagtgcgagccgtacattaccgccgatgaccgtttgatgcaggattgcgcggctcaggtcgtagagggtattcgcattcttgcgcatattctgcagccacgcgaaattcttatcggcattgaagataacaaaccgcaggcgatttccatgctgcgcgcggtgctggcggactctaacgatatttctctgcgggtgattccaaccaaatatccttctggcggtgctaaacaattaacctacattctgaccgggaagcaggttccacatggcgggcgtagttccgatatcggcgtattaatgcaaaacgtcggcactgcttatgcagtgaaacgtgccgttattgatggcgagccgattaccgagcgtgttgtaaccctgactggcgaagcaatcgctcgcccgggcaacgtctgggcacggctggggacgccagtgcgtcatttattgaatgatgccggattctgcccctctgccgatcaaatggtgattatgggtggcccgctaatgggctttaccttgccatggctggatgtcccggtcgtaaagattaccaactgtctgttggctccctctgccaatgaacttggcgaaccacaggaagaacaaagctgcatccggtgtagcgcctgtgctgacgcctgccctgcggatcttttgccgcaacagttgtactggttcagcaaaggtcagcaacacgataaagctaccacgcataacattgctgattgcattgaatgtggggcttgcgcgtgggtttgcccgagcaatattcccctggtgcaatatttccgtcaggaaaaagctgaaattgcggctattcgtcaggaagaaaagcgcgccgcagaagccaaagcgcgtttcgaagcgcgccaggctcgtctggagcgcgaaaaagcggctcgccttgaacgacataagagcgcagccgttcaacctgcagccaaagataaagatgcgattgctgccgctctggcgcgggtgaaagagaaacaggcccaggctacacagcctattgtgattaaagcgggcgaacgcccggataacagtgcaattattgcagcacgggaagcccgtaaagcgcaagccagagcgaaacaggcagaactgcagcaaactaacgacgcagcaaccgttgctgatccacgtaaaactgccgttgaagcagctatcgcccgcgccaaagcgcgcaagctggaacagcaacaggctaatgcggaaccagaacaacaggtcgatccgcgcaaagccgccgtcgaagccgctattgcccgtgccaaagcgcgcaagctggaacagcaacaggctaatgcggaaccagaagaacaggtcgatccgcgcaaagccgccgtcgaagccgctattgcccgtgccaaagcacgcaagctggaacagcaacaggctaatgccgagccagaacaacaggtcgatccgcgcaaagccgccgtcgaagccgctattgcccgagccaaagcgcgcaaacgggaacagcaaccggctaatgcggagccagaagaacaggttgatccgcgcaaagctgccgtcgaagcggctattgcacgcgccaaagcacgcaagctggaacagcaacaggctaatgcggtaccagaagaacaggttgatccgcgcaaagcggcagttgccgcggctattgcccgcgctcaggccaaaaaagccgcccagcagaaggttgtaaacgaggactaaatggtattcagaatagctagctccccttatacccataaccagcgccagacaagccgcattatgctgttggtgttgctcgcagccgtgccaggaatcgcagcgcaactgtggttttttggttggggtactctcgttcagatcctgttggcaagcgttagtgctctgttagccgaagctctcgtactcaaactacgcaagcagagcgtagccgcagcgttgaaagataacagtgcattgctgacaggcttattgctggcggtaagtattccccccctcgcgccatggtggatggtcgtgctgggtacggtgtttgcggtgatcatcgctaaacagttgtatggcggtctgggacaaaacccgtttaatccggcaatgattggttatgtggtcttactgatctccttccccgtgcagatgaccagctggttaccgccacatgaaattgcggtcaacatccctggttttatcgacgccatccaggttatttttagcggtcataccgccagtggtggtgatatgaacacactacgcttaggtattgatggcattagtcaggcgacaccgctggatacatttaaaacctctgtccgtgccggtcatagcgttgaacagattatgcaatatccgatctacagcggtattctggcgggcgctggttggcaatgggtaaatctcgcctggctggctggcggcgtatggttgctatggcagaaagcgattcgctggcatattcccctcagcttcttagtaacgctggcgttatgcgcaatgttgggctggttgttcagtccagaaacactggcagcaccgcaaattcatctgctgtctggagcgaccatgctcggcgcattctttattttgactgacccggttaccgcttctacgaccaatcgtggtcgtcttattttcggcgcgcttgcgggcttattagtctggttgatccgcagtttcggcggctatcctgacggcgtggcttttgccgtcctgctggcgaacatcacggttcctctgatcgattactacacgcgtccgcgcgtctacggccatcgcaaagggtaaaccatgctgaaaactatccgaaaacacggcattacgttggcgctatttgcagcgggtagtacagggttaactgcggccatcaaccagatgaccaaaacgacgattgctgaacaggccagtctgcaacaaaaggcgttatttgatcaggtgctgccagccgaacgctataacaatgcgctggcacagagttgctatctggtaactgcgccagagttaggtaaaggtgagcatcgggtttacatcgccaaacaggatgacaaaccggtagccgccgttctggaagcaaccgcgccagatggctattccggtgcgattcagctgctggtgggagccgattttaacggcacggtacttggcacgcgcgtgacagagcaccacgaaacgccagggcttggcgataaaatcgaactgcgcctttctgactggatcacccattttgcgggtaaaaaaatcagtggtgcagatgatgcgcactgggcggtgaagaaagatggtggtgatttcgaccagttcaccggcgcgacgattactccccgcgcggtggttaatgcggtaaaacgcgccggattgtacgctcagacgttaccggcacaactttctcaacttcctgcctgtggagaataaagcgtgagcgaaattaaagacgttattgttcaggggttgtggaaaaacaactctgcgctggtccagttgctcggcctttgtcctctgttggcggtcacgtccactgccactaacgctctgggtttaggacttgcgactacgctggtactgacgctgaccaacctgaccattagcacgctgcgtcactggacgccagccgagatccgcattcccatttacgtgatgatcatcgccagcgtggtcagcgctgtacagatgctgatcaacgcctacgcctttggcctgtatcaaagtttagggatttttattccgctgattgtcactaactgtatcgttgtgggccgcgctgaagccttcgccgccaaaaaaggtccggcgcttagcgcactggacggctttagtattggtatgggcgcaacctgcgccatgttcgtgctgggtagtctacgcgaaattatcggcaatggcacattgtttgacggtgcagatgcgctgttaggtagctgggcaaaagtattacgcgtggagattttccacaccgactcccctttcctgctggcgatgctgccaccaggtgcatttattggcctgggactgatgctggcaggaaaatacctgattgatgaaagaatgaaaaagcgccgtgctgaagcagctgcagaacgtgcattgccaaacggtgaaacagggaatgtctgatgaataaagcaaaacgcctggagatcctcactcgcctgcgtgagaacaatcctcatcccaccaccgagcttaatttcagtagcccttttgaattgctgattgccgtactgctttccgctcaggcgaccgatgtcagtgttaataaggcgacggcgaaactctacccggtggcgaatacgcctgcagcgatgcttgaactgggcgttgaaggggtgaaaacctatatcaaaacgattgggctttataacagcaaagcagaaaatatcatcaaaacctgccgtatcttgctggagcagcataatggcgaggttccggaagatcgtgctgcgcttgaagccctgcccggcgtaggtcgtaaaacagccaacgtcgtattaaacactgcattcggctggccgactattgctgtcgacacgcacattttccgcgtttgtaatcgtactcaatttgcgccggggaaaaacgtcgaacaggtagaagaaaagctactgaaagtggttccagcagagtttaaagtcgactgccaccattggttgatcctgcacgggcgttatacctgcattgcccgcaagccccgctgtggctcttgtattattgaagatctttgtgaatacaaagagaaagttgacatctgaagaaaaggggtaacaccgattaccccattgataacctttctttatcctcttttaaaacatctttttaacgtcaatgatgccattgcttagcgttatcatcaggtaatccgtttgcggataaccaaaaatgcaggttaattgtttttttaatagcgaaattttctattcattcgtgatcaagatcacgatgctgtcgcaatgtaaaaacattgcaagaatcaggttaaaatcatttaaatttacacacgcaacaaatattgacctacaaaacattacactggctatttttcagaaactggactatctcactagtaaaaacgctaaatagcagaacatatcgccgttaagccatcacccccctctcagtgcagtgaaaaaatctgccgttacgttttttgaaaaatttaacgctggataacatttcccggaatggttgaattccccgcctcagttatatgtaacagattattacaaaggacttgtctgaaagtgcaagatagtgaacattacctgccgtttcccctcccactataacaattgcgcgtatgttttttatacataacgcgagaaagcacccccgttaatatgggatgtaaaaaaagaggtaaaagtgtccactgcaaaccaaaaaccaactgaaagcgtcagtttgaacgctttcaaacaaccgaaggcgttctatctcatcttcagcattgagttatgggaacgttttggttattacggcctacaaggaattatggctgtttacctggttaaacaactgggtatgtctgaagcggatagtatcacccttttctcttcctttagtgccctggtttatggtctggtcgctatcggcggctggttaggtgacaaggtactgggtactaaacgcgtaattatgctcggcgctattgtgctggcgattggttatgctctggttgcctggtctggtcacgacgccggtatcgtttatatgggtatggcggctattgcggtcggtaacggcctgtttaaagctaacccgtcttctctgctttctacatgctatgagaaaaacgacccgcgtctggacggtgcattcaccatgtactacatgtccgtcaacatcggctctttcttctctatgattgctacgccgtggctggccgcgaaatacggctggagtgttgcgtttgcgttgagcgttgtaggcctgctgatcactatcgttaacttcgccttctgccaacgctgggttaaacagtacggtagtaaaccagacttcgagcctatcaactaccgtaacctgctgctgaccattattggtgttgtggcactgatcgctatcgccacctggctgctgcacaatcaggaagttgcgcgtatggcgctgggcgttgttgccttcggtatcgtggttatcttcggtaaagaagccttcgcgatgaaaggtgctgcgcgtcgtaaaatgatcgttgccttcatcctgatgctcgaagccattatcttcttcgtgctgtacagccagatgccaacgagtctgaacttctttgcgattcgtaacgttgagcactccattctgggtctggccgtagaacctgagcagtatcaggcactgaacccgttctggatcatcatcggtagtccgattctggccgctatctataacaagatgggcgataccctgccgatgccaaccaagtttgcaatcggcatggtgatgtgttctggtgcgttcctgattctgccgctgggtgcgaaattcgcgtctgacgctggtatcgtgtctgtaagctggctggtcgcaagctatggcctgcagagcatcggggaactgatgatctctggtctgggtctggcaatggttgctcaactcgttccgcagcgtctgatgggcttcattatgggtagctggttcctgaccactgccggtgcaaacctgattggtggttatgttgcgggtatgatggctgtgccggataacgttaccgatccgctgatgagtctggaagtctatggtcgcgtattcttgcagattggtgtcgctactgccgttattgcagtactgatgctgctgaccgcgccgaaactgcaccgcatgacgcaggatgacgctgcagacaaagcggcgaaagcagccgtagcgtaaaattcagggaaactcttttacaagccgctaacttttcgttagcggctttttttttgttcagcaacgcactaccatactttaaaccacagacaaaaggagttaccgatgaaattgttctacaaaccgggtgcctgctctctcgcttcccatatcaccctgcgtgagagcggaaaggattttaccctcgtcagtgtggatttaatgaaaaaacgtctcgaaaacggtgacgattactttgccgttaaccctaaggggcaggtgcctgcattgctgctggatgacggtactttgctgacggaaggcgtagcgattatgcagtatcttgccgacagcgtccccgaccgccagttgctggcaccggtaaacagtatttcccgctataaaaccatcgaatggctgaattacatcgccaccgagctgcataaaggtttcacacctctgtttcgccctgatacaccggaagagtacaaaccgacagttcgcgcgcagctggagaagaagctgcaatatgtgaacgaggcactgaaggatgagcactggatctgcgggcaaagatttacaattgctgatgcctatctgtttacggttctgcgctgggcatacgcggtgaaactgaatctggaagggttagagcacattgcagcatttatgcaacgtatggctgaacgtccggaagtacaagacgcgctgagtgcggaaggcttaaagtaatagccatcggcccacaggtcgttgtgggccgaaatgagatatttcagagctttgttgcgctgaagtaatgttctggtttggcaatacgatcctgagcagccaccacttgcagctcatattcctgcattgctttggtggtcaccatgatttcgtagactgcagcggtcacatgttccagcgcctcctgcagcgttgccccctgaagcagtttcaccagcagtaaaccgctcgtcacatcaccaacacctaccggctggcgcataccaaaatccaccagcggacggctgatatgccaggcttcatcggcggtgaccagcagcatttcaaaacggtcacggctgtagccagctcgcgccaggtgtttaaccaacacaatttgtggcccttgcgcaatgagttcgcgcgctgccagaaccgcttcttcgacgttatttaccgcatgctcacagagtatttccagctcaaccagatttggcgcaatgatatcgctggcaggcaaaccgtgccgcacatgaaactctgcgacacccggtgcaacgatacagcctttttccggatgacccattaccggatcgcaaaaatatttcgcctgcggattcgcggctttcacctgacggacgataccgaggatatgttcaccctgctccgcgcttcccagatagccacttaatacggcatcacaggtgtgtaatttatcaatggcggcaatgccttgcacaatttcggttaaatggctgggcggcatcacgcagccagtccatttgccgtattgggtgtgattagaaaattgaacggtgttcagcggccagacgttcgcgcccaggcggcgcatcggaaactctgccgcactgttacccgcatgaccataaacaacgtgagactggatagcgagaatatttttcatcatgttccctgtataaaaaccagggggagtgatttctcactccccctttccacttaatgcattatttccagcaaatcagacagtaattctttttaccgcgacgcagtaaggtaaaacgaccaaacagacgatcttcttctttaaagaagtattcaggatcggactgtttttcaccgttaatggtgatggcattggaggcgatagttttacgtgcctgaccacgggaaggttgcagttcagaatcgaccagtgcctgcatcaggtctgcgcccttttccatctcaaccatcggtacgccgtcctgcgccagctgttcgaagtccgcttcactcagcgcactcaaagaaccgctgaacaggcattcggtaatacgttttgccgcctgtaaaccttcttcaccgtgaaccagacgagtcacctgctccgccagtacatactgggcgcgcggtgctttaccgctgtttttatcttcttcttccagggcgttgatctcttcaatgctcataaaggtgaagaacttcaggaagcggtaaacgtcggcatccgcagtgttgatccagaactggtagaatttgtacgggctggttttcttcggatccaaccagactgcgccgccttcagttttaccaaatttggtgccatctgctttagtgatcagcggaacggtcaggccaaacacctgattctgatgcagacgacgggtcaggtcgataccagaagtgatgttaccccactggtcagaaccaccaatttgcagcaccacaccgtactgtttgttcagacaggcgaagtcataaccctgcaacaggttgtaggaaaactcagtgaagctaatcccctgatcttcacggttgagacgctgcttaaccgcttctttgttgatcatctggttaacggagaagtgtttgccaatatcgcgcaggaaggtcagcacattcatattgccgaaccagtcatagttgttcgccgcgatagcagagttttctccacagtcgaaatcgaggaacggggcaacctgcttacggattttgtccacccactcctgaacagtttcttcggtgttcagcttacgctcggcagctttgaagctcgggtcgccaatcagacccgtcgcgccgcctaccagcgcaaccggcttgtggcccgcctgctggaagcgtttcaggcataacaatggaacaagatgccccaaatgcaagctgtcagcggtaggatcgaagccgcaatagagcgcgatcgggccttgcgccagtcgctctgctaacgcttcctcgtccgtcacctgggctaccagcccccgctcttgcaattgtttaatcaagttactgcttgccatcaaaatctccatgtatataacgactgcacctttgccggtacacgacttttcgccagatgcgaaagagacatagaataaagtgccagaatcaggagtaccagcgattaaagcaagatttttgcatcttttcagggtgcaagacgatcaatcttccacgcatcattttcacgctggtacaaaaagcggtcatgcaggcgatgctcaccaccctgccagaactcaatctgttcaaggctgacgcgaaaaccgccccaaaagctcggcaatggcacttcgccctgttgaaacttctgcttcagctccaggaatttactttcaaggataccgcgggcagaaatgcgactggactgcttgctaacccatgcaccaatctggctatcacgcgggcggctatgaaaatatttcatcacttcgagagtgctaagtcgttctgctttaccgatcaccatcacctggcgctcaagggtatgccacgggaacagcaggctaacgcgcggattattttcgatttgatgtgctttacggctgccgaggttggtgtaaaacaccatgcctttttcgtcgtaatgtttgagtaaaacgatgcgctgataaggctgaccatgttcatccacggtagcgaccaccatcgcggtagggtccgccagtttggcttcacaagcctgagagagccaacgttcaaaaagggttaatggatcggcgggaagatcgcggcggcgtaacccgcctttggtgtattcacggcgcagatgcgcgatttgctgcaattcgtcgttatcagacatggttttctttacggattgtcagtgggtgacgctattgtgcgccgcccctggaaaaatctcaacgctgtggattttgtaactgacagttattcaagacgatgcggtcgcgtttatagacagtcgcttcatcgcctttgctccagaaaacatagattccgtcagtgtaacgcgcgccagaggcactaatgccctgtttgagatgcagtagttgattatcgtaaacaaaactgacctcctggcgcggattattcagtttgaccgtcaacggtttttcatcacactggtattccagcgtatcggtttgcatgcgctcaaccagctgattaaaggcgctacagccggagagaaggaccggcaaaatgataattaacagttttttcatagtcatatcccgaagactttcctggtctggagggcaatacgccctccctaacgttccaagtgtaacggcagacgcggtaagaaaaattcagttaactctgatatcacgggttagcggggaaaatagcccccagtaccgtctcctggcttgcgccagtgacggaaggcagatttcctggtaatcccgccagcgtccgccaggcaagccaggcgaaagccaatgcttccatgtcatcgccactaatgccaacggcatcggtggtggtgacttctgtgcctggcagtaatgccgccagacgcgccatgagtagcggattacgactacctccaccacataccatcaatcgttcgcagccaccgctcaacaaaacttgttcagaaatggtcacggcggtgagttctgccagtgtcgcctgcacatctcggggatcaacacccggaaaatggcgcaaatggcgctccagccaaccatagttaaagtattcgcgtccggtgcttttcggtgcaggttggctgaaatacgggtcgctgagcatattttgcagcagtgggagaataactttacccgcccgtgcccactcggcatctttatcgtaaggtttaccggcctgacgccagatccaggcatccatcagcatgttaccaggaccggtatcgtagcccccaaccggctgcccaggaatgagcagactcagattggcgatgccgccaatattgagcaccattcgtcgctcggttgggtgagccagcagcgcatgatggaacgcaggtaccagcggtgcgccttgtcctcccaaggcaatatcgcgacggcgaaaatcaccgacaaccgtaattccggtgcgtgccacaatttgattgttatcgccaatctgtaaagtgtgtggtgccacgcccgtcggttcatgccagacggtttgaccgtgacaaccgatcgcaactatatctcttgcctgcagattttgttccttaagcaaggcattgaccgcatcagcaaaaagttgcccgagttgagtatcaagctgtccaaactggctaagtgtaagctgctggccctggcaaatatccagtacagcctgtttcagagataccgggatcggccaactcaaacttgccagctgtgcgacccggtgttcatcaattgtcgccaacacaacatcaacaccatcaaggctggtgccactcataacgccaataaagcggccgcttttcatagttcatcctttttcaatctgacgtttgcgcaccactcaaacataaacttttcgtgaataccatgcggaatgaccgatttttaccgttggtagtaaaacattatcttcaaatcaataatcatcatgaatgttttgtttataattggttgatcctactttcattatgatttgctcatatttggtagaacatgtaaccatggattcacatatgccatatactttgaccatgagggatgcttgcgtggcgtttcatggtgaacaggagatttttcaatgattaaacgcgtattggttgttagtatggtaggtctgtctcttgtcggttgtgttaataacgacaccctgagtggggatgtttataccgcttctgaagcgaaacaagtacagaatgtcagctatggcaccatcgttaacgtacgtccggtacagattcagggcggtgatgattccaacgttatcggtgcaattggcggtgctgttcttggtggtttcctggggaatactgttggtggcggaaccgggcgttctctggctactgcagcaggcgctgttgcaggtggcgtagctggtcagggcgtacagagtgcaatgaacaaaacgcagggtgtcgagctggaaattcgtaaagacgatggtaataccatcatggtggtacagaaacaaggcaacactcgtttctctccgggccaacgtgtcgtactggccagcaatggcagtcaggtgaccgtttctccgcgctaaataagtttgcgtgtggtcaggttactgaccacacgcccccttcatttcaccctttggcctgtaactcaatgatattatgctcaagttttgcgatgagcgtaatcagttgctccagttcctctgcggagatgccatgtaatatttccgcgcgggttttgttaataacagcttccatttcgctgatcagcggctctgccttttccgtcagtttaatacgtttagcccgacgatcgctggcacaagtttgacggctaattaaccctttttcttccagttggtccagagtacggaccagacttggctgctcgatgccaatcgcttttgccagttgaatttggctctggtctggaggtaactgatggatattgtgtaacgtaacccaatgggtttgtgttaactccagcggtttcaggcgatggtctatcagagcacgccatatgcgcaccaaccgtgccagatcagaacctagtgggctttccaatttcatctccttataattagcttgctaagatattatgcggcttttagaatagtgtgcagcaattgtattgctaaaacaaatgtattgctgcatttggttaccgtcagacatatttttcagaaattgcgcgtaaatttttcgcacttaaagaatatttattaatctaacgcaatatattcggtcgtaaaggaatctactttgtgaagtttatgctcaatgcaacaggattgcccttacaagatctggtgttcggtgcgtccgtctactttcctccgtttttcaaagcattcgcgtttggattcgtcatctggcttgtcgtacaccgcctgcttcgtggctggatctacgccggtgacatctggcatcccttgttaatggatttaagcctgtttgcgatttgcgtttgccttgctctggcaatactgattgcgtggtaactatgagtattaaaacaattaagtatttcagtacaatcattgtagcggtagttgcggttcttgccggatggtggctgtggaattattacatgcaatctccgtggacacgcgacgggaaaatacgcgcagaacaggtttctatcaccccacaggtgagcggacgtattgttgagctgaatataaaagacaaccagctggttaacgcgggggatcttctgctcacgatcgataaaacgccctttcagatcgccgagctgaacgcacaggctcagctggcgaaagcgcaatctgacctcgcaaaagccaataacgaagcgaatcgtcgtcgtcatctcagtcaaaattttatttctgccgaagaactcgataccgctaacctcaatgttaaagcgatgcaggccagtgttgatgccgcacaggcgacgctgaaacaggcacaatggcaactggcgcaaacggaaattcgcgccccggtgagtggatgggtgactaaccttactacccgcatcggcgattacgctgataccgggaaaccgctgtttgcccttgtcgacagccacagcttttacgtcattggttattttgaagaaaccaagttgcgccatatccgcgaaggtgcaccagcacaaattaccctctatagtgataacaaaacgttacagggtcacgtttccagtatcggtcgggcgatttatgatcagagcgttgaaagtgacagtagccttattccggatgttaaacctaacgtcccctgggttcgactcgcccaacgcgttcccgtccgctttgcgctggataaagtcccaggcgatgtcacgttggtgagcggcaccacctgtagcattgccgtaggtcaataatgaacgcaagcagttggtccttgcgcaatttgccctggttcagggccacgctggcgcaatggcgttatgcgttacgcaataccattgccatgtgtctggcgctgacggttgcctattatttaaatctggatgaaccctattgggcgatgaccagcgctgcagtggttagctttcccaccgttggcggtgttatcagcaaaagcctcggacgcatcgctggcagtttgctcggagccattgcggcactgcttcttgccgggcatacgctcaatgagccgtggttttttctattgagcatgagcgcgtggcttggcttttgtacctgggcctgtgcgcacttcacgaataacgtcgcgtatgcatttcaactggcgggctacacggctgccatcatcgcctttccgatggttaatattactgaggccagccagctgtgggatatcgctcaggcgcgcgtttgcgaggtaatagtcggtattttgtgcggcggcatgatgatgatgatcctgccgagcagttccgatgctactgcccttttaaccgcattgaaaaacatgcacgcccgattactggaacatgccagtttactctggcagcctgaaacaaccgatgccattcgtgcagcacatgaaggggtgattgggcagatactgaccatgaatttgctgcgtatccaggctttctggagccactatcgttttcgccagcaaaacgcgcgccttaatgcgctgctccaccagcaattacgtatgaccagtgtcatctccagcctgcgacgtatgttgctcaactggcccagtccgccaggtgccacacgagaaattctcgaacagttgctgacggcgctcgccagtagccaaacagatgtttacaccgtcgcacgtattatcgccccgctacgcccgaccaacgtcgccgactatcggcacgtcgccttctggcagcgactacgttatttttgccgcctttatctgcaaagtagtcaggaattacatcgtctgcaaagcggtgtagatgatcataccagactcccacggacatccggcctggctcgtcataccgataacgccgaagctatgtggagcgggctgcgtacattttgtacgttgatgatgattggcgcatggagtattgctagccaatgggatgccggtgccaatgcattaacgctggcagcaattagctgcgtactctactccgccgtcgcagcaccgtttaagagcttgagtcttctgatgcgcacgctggtgttacttagcctattcagctttgtggtcaaatttggtctgatggtccagattagcgatctgtggcaatttttactgtttctctttccactgctggcgacaatgcagcttcttaaattgcagatgccaaaatttgccgcattgtgggggcaactgattgtttttatgggttcttttatcgctgtcactaatcccccggtgtatgattttgctgattttcttaacgataatctggcaaaaatcgttggcgtcgcgttggcgtggttagcgttcgccattctgcgtccaggaagcgatgctcgtaaaagccgccgccatattcgcgcgctgcgccgggattttgtcgatcagctaagccgccatccaacactgagtgaaagcgaatttgaaagcctcacttatcatcacgtcagtcagttgagtaacagccaggatgcgctggctcgccgttggttattacgctggggtgtagtgctgctgaactgttctcatgttgtctggcaattgcgcgactgggaaagccgttccgatccgttaagccgagtacgggataactgtattagtctgttgcggggagtgatgagtgagcgtggcgttcagcaaaaaagtctggcggccacacttgaagaattacagcggatttgcgacagccttgcccgtcatcatcaacctgccgcccgtgagctggcggcaattgtctggcggctgtactgcagccttagccaacttgagcaagcaccaccgcaaggtacgctggcctcttaattacttaattacaccacaggcatagcgttcaccgccaccgcccagcggtttaggttgatcggacatattatcgccgccaacgtggaccatcagcgctttgtctttgatttcatccagacttttcagacgaggcgcgatgacggcatcggtagctttgccgtcattattgacgaccagtgcaggcagatcgcctaaatgcccggcaccttctggcccttcatgtttaccggtattttgtggatcaagatgcccgcctgcggattccgcggcgctggctttgccatctttggtggctggctggcagcttcctttggcatgaatatggaagccatgttcaccggggggtaatgctttcagatcggggctaaactccagacctttatcggtttcagtaatggtgacgctaccaatactctgccctaccccttggctcgtgacgaggttcatctcgactttttcactggcagcttgtgcgccggttgcaacaaccagcgccagaatagccagactaaaacgtttcataggacctccgttcattgtgcattcctgaataagtgtaaaccagtgacacatttttgaacggcggctattcctaaaagtgcttacggtacgtcgtaccccagtgccgctttacggatacgaaaccattgttgacgggtcattttcagtgtttctgcttcgacagctgcccgtacgcgctcaattttaccactaccgataattggcagcggctggcttggtaaacgtaatacccaggcgtaaaccacctgttcaatgctgcccgcgtttaactcctctgccaccacagccagttcatcacgcagcggctggaaataatcatcattaaacagacgaccaccaccaaggcaggaccacgccatcggacgaacacgcagttgttgtagttggtcgagcgtgccatccagcagtaacggctgatgcaccggggatatttccacctgattagtggcaagggtaaacggcagacgactttgcaacagggcaaattgcgcaggcgtaaagttgcttacgccaaaatgacgcactttgccgctctgatgcagatgtttgaacgcgtccgccacttcatcggcatccattaacgggtctggtcggtggattaacagcaaatccagatgatcggtcgcgagattaattaggctctgttcggcgctcttaatgatgtgatcgcggtcagtgatgtaatgaccaatgacgttttcttcacgcgcggtcgtcgcgataccgcatttactgacgatttccatccgttcacgcaggtgaggtgccagtttcagtgcctcgccaaacgccgcttcgcactgatagccaccataaatatcagcatggtccacggtggtcacgccgagatccagatgctcttcaataaaactgaccagctggcgggcggacatattccagtccatcaatcgccagtagcccatcacaaaacgggaaaactccgggccttgcggcgcaatagtaatacgctgaaccataatcgcttcctcttatcagatatgagaggagtatacgcaagattaggttcaaaagagacttggttgctccggttcgtcactactcgctggcttatttgcgcgtaatttgcgcattaatcgctgccgacaaaggcgcagcacctcttgtttttcgccatcgctcattttattccagttaaaacgctcatcacgactacgaaaacagccgcgacaaaacccgcgttcgtcagactggcaaattccccggcacgggctctggacgggaaagaactctaattgctccgccacttcgccctcctcagataagattattaccattattgaagctgttaatgtccaaagtagcaactttgcttgcactagaccgactggtctactacactccaacgcatgaacaaacacaccgaacatgatactcgcgaacatctcctggcgacgggcgagcaactttgcctgcaacgtggattcaccgggatggggctaagcgaattactaaaaaccgctgaagtgccgaaagggtccttctatcactactttcgctctaaagaagcgtttggcgttgccatgcttgagcgtcattacgccgcatatcaccagcgactgactgagttgctgcaatccggcgaaggtaactaccgcgaccgcatactggcttattaccagcaaacactgaaccagttttgccaacatggaaccatcagtggttgcctgacagtaaaactctctgccgaagtgtgcgatctgagtgaagatatgcgcagcgcgatggataaaggtgctcgcggcgtgatcgccctgctctctcaggcgctggaaaatggccgtgagaaccattgtttaaccttttgtggcgaaccgctgcaacaggcacaagtgctttacgcactgtggcttggcgcgaatctgcaggccaaaattagccgcagtttcgagccactggaaaacgcgctggcccatgtaaaaaacattattgcgacgcctgccgtttaacaggcattttttatcaccagacgaccgggagcctttatgagttctgaaaaactgtattccccactgaaagtgggcgcgatcacggcggcaaaccgtatttttatggcaccgctgacgcgtctgcgcagtattgaaccgggtgacattcctaccccgttgatggcggaatactatcgccaacgtgccagtgccggtttgattattagtgaagccacgcaaatttctgcccaggcaaaaggatatgcaggtgcgcctggcatccatagtccggagcaaattgccgcatggaaaaaaatcaccgctggcgttcatgctgaaaatggtcatatggccgtgcagctgtggcacaccggacgcatttctcacgccagcctgcaacctggcggtcaggcaccggtagcgcctagtgcacttagcgcgggaacacgtacttctctgcgcgatgaaaatggtcaggcgatccgtgttgaaacatccatgccgcgtgcgcttgaactggaagagattccaggtatcgtcaatgatttccgtcaggccattgctaacgcgcgtgaagccggttttgatctggtagagctccactctgctcacggttatttgctgcatcagttcctttctccttctagtaaccatcgtaccgatcagtacggcggcagcgtggaaaatcgcgcacgtttggtactggaagtggtcgatgccgggattgaagaatggggtgccgatcgcattggcattcgcgttagtccaatcggtactttccagaacacagataacggcccgaatgaagaagccgatgcactgtatctgattgaacaactgggtaaacgcggcattgcttatctgcatatgagtgaaccagattgggcggggggtgaaccgtatactgatgcgttccgcgaaaaagtacgcgcccgtttccacggtccgattatcggcgcaggtgcatacacagtagaaaaagctgaaacgctgatcggcaaagggttaattgatgcggtggcatttggtcgtgactggattgcgaacccggatctggtcgcccgcttgcagcgcaaagctgagcttaacccacagcgtgccgaaagtttctacggtggcggcgcggaaggctataccgattacccgacgttgtaatccaacattgcgagcggcgtaaagccgccgctatactaaaacaacattttgaatctgttagccattttgaggataaaaagatgcgtcttcttcataccatgctgcgcgttggcgatttgcaacgctccatcgatttttataccaaagtgctgggcatgaaactgctgcgtaccagcgaaaacccggaatacaaatacagtctggcgtttgttggctacggcccggaaaccgaagaagcggtgattgaactgacctacaactggggcgtggataaatacgaactcggcactgcttatggtcacatcgcgcttagcgtagataacgccgctgaagcgtgcgaaaaaatccgtcaaaacgggggtaacgtgacccgtgaagcgggtccggtaaaaggcggtactacggttatcgcgtttgtggaagatccggacggttacaaaattgagttaatcgaagagaaagacgccggtcgcggtctgggcaactaatctcctgccgggcgtgaactcatcgcgcccgcatctttactgcatcgacaagtaatatttgtcataatgcgcgctgcaatttatccgtattaagagaatcagatgtccgataacgctcaacttaccggtctgtgcgaccgttttcgtggtttttatcctgttgtgatcgatgttgaaacagccggatttaacgccaaaaccgatgcgctgcttgagattgccgccatcaccctgaaaatggatgaacaaggctggctgatgccggacaccacattacatttccacgtcgaaccatttgtcggcgcaaatttgcaaccagaagccctcgccttcaacggcattgacccgaacgatcccgatcgcggcgcggtcagcgaatacgaggcgctgcacgaaatttttaaagttgtacgtaaaggtattaaagcgagcggctgtaaccgcgccattatggtggcgcacaatgccaattttgatcacagctttatgatggccgccgcagaacgcgccagtctgaaacgtaacccgttccaccctttcgccacttttgacactgctgcactggccgggctggcactcggacaaaccgtattgagtaaggcttgccagaccgctggcatggacttcgacagcacccaggcgcactccgcgctgtacgacaccgaacgcactgctgtgctgttttgtgaaatcgtcaaccgctggaaacgtctgggaggctggccgctatctgccgccgaagaggtgtaatcgagtcgatgcctgatgacatgcaatgattcaggcatctatagtgaggctattccacgcatcctgcatgatattcacggggaatagcgttaatggcagataatccagaccctagtagcctcctgccggacgtgtttagtccggcgacccgcgactggtttcttcgcgcctttaaacagccgaccgctgtccagccgcaaacctggcatgtggcggcgcgaagcgaacatgcgctggtgattgcaccgaccggctccgggaaaacgctggcagcatttctctacgccctcgatcggctcttccgcgaaggcggcgaagatacccgcgaggcgcataagcgtaaaaccagtcgcatcctctatattagtccgataaaagccctgggcaccgacgttcagcgcaacttgcagatcccgttgaagggtattgccgatgaacggcggcggcgcggcgaaacggaagtcaatcttcgcgtagggatccgtactggcgatacgcctgcacaggaacgcagcaaactcacccgtaatccgccggatattctgatcaccacacccgaaagtctctatctgatgctgacctcccgcgcgcgcgaaacgctacgcggcgtcgaaacggtaattattgatgaagtccacgcggtagcgggcagtaaacgtggtgcgcatctggcgttaagtctggagcggctcgatgcgctgctccacaccagtgcacagcgaattggcctttctgccactgtgcgcagtgccagcgatgtggcagcatttcttggtggcgatcgcccggttacggtagtcaacccgcccgcaatgcgccatccgcagatacgaattgtcgtaccggtcgccaatatggatgatgtcagtagcgtcgccagcggcaccggcgaagacagccatgccggccgggaaggctccatctggccatatattgaaacgggtatccttgatgaagtgttgcgccatcgcagcaccattgtctttactaatagccgggggctggcggaaaaactgacggcacgattaaatgagctttacgccgcacgcttacagcgttccccgtctatcgccgttgatgcggcccatttcgagagcacctccggcgcaacctctaaccgtgtacaaagtagcgacgtttttattgcccgcagtcaccacggctccgtctctaaagaacaacgagcaatcaccgaacaggcgctgaaaagcggtgaattacgctgcgtggtcgcaacctccagtcttgaactggggattgatatgggcgcggtggatctggtgattcaggtggcaacgccgctttctgttgccagtgggttacaacgcattggtcgcgccggacatcaggttggcggtgtatctaaagggctgtttttcccccgtacccggcgtgatttagtcgattccgcagtcattgtagagtgtatgttcgcaggcaggctggaaaacctgacaccaccgcataatcctctcgacgtccttgcgcagcaaaccgttgccgccgcggcgatggatgcattacaggtagacgaatggtactcccgcgtacgccgtgccgcaccgtggaaagatctgccaagacgtgtttttgacgccacgctggatatgctttccgggcgctatccctctggcgatttttctgcttttcgccccaaactggtctggaacagggagaccgggatattgaccgcccgacctggcgctcaattgttggcggttaccagcggcggcaccattccggatcgtggcatgtatagcgtgttattacccgaaggtgaagaaaaggccggtagccggcgggtgggtgaactggatgaggagatggtatatgagagccgggtgaacgacattatcactctcggcgctaccagttggcggatccagcaaatcacccgcgatcaggtgattgtgactcctgctccgggtcgttctgcccggctccccttctggcgtggtgaaggtaacggacgtccggctgaattaggcgagatgatcggcgattttcttcatttgctggcggatggcgcgttcttttccgggactattcccccgtggctggcagaagaaaatacgatcgccaatattcaggggttgattgaggagcagcgcaacgcgacgggcatcgttccggggagtcgccatctggtcctcgaacggtgccgtgatgaaattggtgactggcgtattattttgcactctccctatggaagacgggtgcatgaaccctgggcggtggcgattgccgggcgaatacatgcgctatggggcgctgacgcgagcgtggtcgccagtgatgacggcattgttgcacgtattcctgacaccgatggtaaattgcccgatgccgcgatttttttgtttgaaccagaaaagttgctgcaaattgtccgcgaggcggtaggcagcagcgcacttttcgccgcccgttttcgcgaatgcgccgcgcgggcattattaatgccggggcgcactccgggccatcgcaccccgctttggcaacaacggctgcgcgccagtcagttgctggaaatcgctcagggatatccggattttccggtcattctcgaaaccctacgcgaatgtctgcaagatgtttatgatcttcccgcactggaacgtttgatgcgtcgcctgaacggtggcgaaattcaaatatccgatgtaacgaccactacgcccagccctttcgccacaagtttattgttcggctatgtcgcggaatttatgtaccagagcgacgccccgctggcagagcgccgggcatccgtactgagcctggacagcgagttactgcgcaatctactcggacaggtcgatccgggggaattactcgacccgcaggtcattcgccaggtggaagaagagttgcaacgactggctcctggcagaagagcgaaaggtgaagaaggattgttcgacctgctgcgcgaactggggccaatgaccgttgaagacctggcgcaacggcatacaggcagcagtgaagaggttgcgagctatctggaaaatcttcttgcagtaaaacgaatcttcccagcgatgattagcggacaggagcgtcttgcctgtatggatgatgccgccaggctgcgtgatgccctcggcgtacgactaccagagagtttgccagagatttatttacatagagtcagttacccgcttcgcgacctctttctgcgctatctccgggctcatgctctggtcacggctgaacaactggctcatgagtttagtctcggtattgccattgtcgaagagcagcttcagcaactgcgtgaacagggtctggtgatgaatctgcaacaagacatctgggtgagcgatgaagtatttcgtcgtctgcgtttgcgcagcctgcaagccgccagagaagcgacgcgtcccgttgcagccacgacctatgcgcgattgctgctggaacgtcagggcgtattacccgccaccgatggtagcccggcgctctttgccagtacaagcccaggcgtttatgagggcgtagatggcgtgatgcgggtgatcgaacagcttgccggagtcggtttacccgccagtctctgggaaagccagatcctgcctgcccgcgtacgcgactatagcagtgaaatgctcgatgaattactggcaaccggtgcggttatctggagcgggcaaaaaaaactgggtgaagatgacggcctggtggcactgcatctacaggaatatgctgcagaaagcttcactcccgccgaagcggatcaggcgaatcgtagcgcgctgcaacaagcgatagtcgctgttctggctgacggaggagcctggtttgcacaacaaatcagccaacggatacgcgacaaaatcggcgaaagcgttgatctctctgccctgcaagaggcgttatgggcgctggtctggcaaggcgtcatcaccagcgacatttgggcaccgttacgcgccctcacccgcagcagttccaacgcacgcaccagtactcgccgcagtcaccgggctcgtcgtggacgtcctgtctatgcgcaacccgtcagcccgcgggtatcttacaacacaccaaatctggctggacgctggagcttattgcaggtggagccactaaacgataccgaaaggatgctggcgctggcggaaaatatgctcgaccgctacggcatcatcagtcgtcaggcggtgatagccgaaaatatccctggcgggtttccaagcatgcaaacgctttgtcgaagtatggaagactccgggcgaattatgcgaggtcgttttgtagaaggtctgggtggcgcgcaattcgctgaacgtctgactattgaccgattgcgcgatctggcgacacaagccacgcaaacgcgccactatacaccagtggcgctctctgccaacgatccggctaatgtgtggggaaatcttctgccctggcctgcacatccggcaacgctggttccaacgcgtcgggcgggtgcgctggtggtcgtttctggcggcaaattgttactctatctggcgcaaggtggcaaaaaaatgctggtctggcaggaaaaagaggaattactcgccccagaggttttccacgcgctgactaccgcactgcgtcgcgaaccacggctgcgctttacgctaacagaagtgaatgatctaccggtccggcaaacgccgatgtttacgctgctgcgtgaggcgggatttagtagtagcccacaagggctggattggggataaagaaaggactgacggatgcccgttcgcatccgtcagtattgcaggacggattattccgcgtccggctcttcagacttgtatttagcggcagtttctttgatcagctgctgcagttcgccacgctgatacatttcgatcacgatatcacaaccgccgaccagctcgccgtcaacccacagttgcgggaaggtcggccagttagcatatttcggcagttccgcacgaatgtccggattctgcagaatatcaacataggcaaaacgttcgccacatgcggcaagcgcctggactgcctgggcagagaaaccgcagctcggcagtttcggactacctttcatgtacagcaggatcgggttttcagcaatctggcgttggattttttcgatagtggtgctcattgtcttgcttcctcaaacttctttacggcagtaatctgacattgtagcgggtcagtgcggcatcggaaaataacattttcatcacgcttttgctattttatccctttgctctatttgttgcatttcaaatattcgtttcttctctgatgccggcaaactggcgtatttataaccatttttagctttcactgctgcatttttttgcgctcgccaacgaaacgtattttttaacaataaaagctattaactttctcttcttctatgcattagaatcatcaagttttgtaaatcagacgcaggcatgatagacctgcctttacagagggacgctcagtggcgcggataaaccgtattagcatcacgctctgtgctttactttttaccaccctgcctttaacgcctatggcccatgctagtaagcaagccagggagagttctgctaccactcatatcaccaaaaaagcagataaaaagaaaagcacggcaaccaccaaaaagacccagaaaacagcgaaaaaagccgccagtaaaagtacgaccaaaagcaaaaccgcttcttccgttaaaaaatcttccattaccgcttctaaaaacgccaaaactcgcagcaaacacgccgtcaataaaacggccagtgccagctttaccgaaaagtgtaccaaacgtaagggctataaaagccattgtgtgaaagtcaaaaatgccgcgagtggaactcttgccgacgcgcacaaagcgaaggtgcaaaaagctacgaaagtggcaatgaataaactgatgcagcaaattggtaagccatatcgttggggtggcagcagtccgcgtaccggttttgattgcagcggcctggtttattacgcttataaagatttggtgaaaattcgtattccgcgtacggcgaatgaaatgtatcacctgcgtgatgcagcgccaatcgaacgtagtgaactgaaaaacggcgacctggtctttttccgtactcagggacgcggcacagccgatcatgtcggcgtgtatgtcggcaacggcaaatttattcagagtccgcgcacaggtcaggaaattcaaatcacttctctcagtgaagactactggcagcgccactatgttggcgctcgtcgggtaatgaccccaaaaacacttcgctaaaactttaccctgttgttacggcaacagggtaagttcatcttttgtctcaccttttaatttgctaccctatccatacgcacaataaggctattgtacgtatgcaaattaataataaaggagagtagcaatgagtttcgaattacctgcactaccatatgctaaagatgctctggcaccgcacatttctgcggaaaccatcgagtatcactacggcaagcaccatcagacttatgtcactaacctgaacaacctgattaaaggtaccgcgtttgaaggtaaaagtctggaagagattattcgcagctctgaaggtggcgtattcaacaacgcagctcaggtctggaaccatactttctactggaactgcctggcaccgaacgccggtggcgaaccgactggaaaagtcgctgaagctatcgccgcatcttttggcagctttgccgatttcaaagcgcagtttactgatgcagcgatcaaaaactttggttctggctggacctggctggtgaaaaacagcgatggcaaactggctatcgttagtacctctaacgcgggtactccgctgaccaccgatgcgactccgctgctgaccgttgatgtctgggaacacgcttattacatcgactatcgcaatgcacgtcctggctatctggagcacttctgggcgctggtgaactgggaattcgtagcgaaaaatctcgctgcataataactgatggcaaatgcagcattgcctgaagcgctacgcttatcaggcctacgcggatcatcgatgtaggtcggataaggcactcgccgcatccggcaagataaatcgcacgttgtcagcaactgtaacgcagaaggttatccttctgcgtttttgtttaattagctgttagcaacgcaaactgtttcaggttgttttctggcactcataaacaccagcaataatgccagtcccgcgacaatcgctcccatcaccggcacaaagctgtatcccagcccagcggaaattaccgcaccaccagcagctgctcccagcgcatttccaagattaaaggcaccaatattgacactactagacagacctggcgcttcactggcgacacgcatcacgcgcatctgtaacggcggtacgaccgcaaaggttgctgcgccccacaccaccatgctaatagctgcgccgaactcattgcgggccaggaacgggattgccagcataatcaccatcaacaacaacaaaaagcctttcaacgtgccgttaacactacgatctgccagtttgccgccgagatagttaccgatagagaatccgacaccaatcagcaccagcattgccgtgacgaacaccggtgttgcgtgggtaatactttgcagtaccggagagatataggtgtagagagtaaacattgcaccagctcccagtaccgtcgtcagcaatgcagacagcacctgcggacgcattaataccgccagctcttttttcacttcaggtcgtgcccctgcaccacctttaggtaaactgaagaacagacttaccatactaatcactcccagccccgccgttgccagaaaactcatccgccagccgatggtttcacccaaccaggtcgccgccggcacgccaccgatatttgccagggttaaccccataaacatagtggcaactgcgctggcctgtttatgttttggcaccacgcttgcggccacgacactacccaaaccaaaaaatgctccgtgattcaggctggtcaaaatgcgactaagcatcagggtcatataatccggcgcgatggcggaaagtacgttgccgagcgtgaaaattgccatcaggaaaatcaacgcactgcggcgggcacgatgagaaagtagaagcgtcatcagcggcgcgccaaccattacgccaactgcataggcactgattaacattccggcagcgggaatgctgacatccacaccgcgcgcaatgacgggcaacaagcccattgggctgaactccgttgtcccgataccaaacgcgccaatcgccagcgccagcaacggatagttaattttcatgccttatctccacctcttcgcgtcattacgcgatattcattaaagtggcgaaagcatgacagcaatcacaaaaaaatgaaaataacaaaaagagaaaacacttttgccattttgctaacaaacaggaaggagatgcgagggagaacgcgctccctcgagaggaaatcagtgcagcgcggcagtcaaacccacggctacgatcaaaccgaggacgataatcgttgttaccagtgaaaatttaaggtcggtgctcatcaagttttctccttttttattaccacacaaaaagtgatattacgcatttttacacactgtgatgaaaaaatctcccgtcatttataatgataagtgtttttaccacttccccttttcgtcaagatcggccaaaattccacgcttacactatttgcgtactggccattgaccccttcctgacgctccgtgtcgtttttccggcgtaccgcaacacttttgttgtgcgtaaggtgtgtaaaggcaaacgtttaccttgcgattttgcaggagctgaagttagggtctggagtgaaatggaatggcaacaataaaagatgtagcgaaacgagcaaacgtttccactacaactgtgagtcacgtgatcaacaaaacacgtttcgtcgctgaagaaacgcgcaacgccgtgtgggcagcgattaaagaattacactactcccctagcgcggtggcgcgtagcctgaaggttaaccacaccaagtctatcggtttgctggcgaccagcagcgaagcggcctattttgccgagatcattgaagcagttgaaaaaaattgcttccagaaaggttacaccctgattctgggcaatgcgtggaacaatcttgagaaacagcgggcttatctgagcatgatggcgcaaaaacgcgtcgatggtctgctggtgatgtgttctgagtacccagagccgttgctggcgatgctggaagagtatcgccatatcccaatggtggtcatggactggggtgaagcaaaagctgacttcaccgatgcggtcattgataacgcgttcgaaggcggctacatggccgggcgttatctgattgaacgcggtcaccgcgaaatcggcgtcatccccggcccgctggaacgtaacaccggcgcaggccgccttgccggttttatgaaggcgatggaagaagcgatgatcaaggtgccggaaagctggattgtgcagggtgactttgaacctgaatccggttatcgcgccatgcagcaaatcctgagccagccgcatcgccctactgccgtcttctgtggtggcgatatcatggcaatgggcgcactttgtgctgctgatgaaatgggcctgcgcgtcccgcaggatgttagcctgatcggttatgataacgtgcgcaacgcgcgctattttacgccggcgctgaccacgatccatcagccaaaagatagcctgggtgaaacagcgttcaacatgctgttggatcgtatcgtcaacaaacgtgaagaaccgcagtctattgaagtgcatccgcgcttgattgaacgccgctccgtggctgacggcccgttccgcgactatcgtcgttaatcacccgttgcgggagtctcttccggctcccgcagccactccttattcagcgtctcactatcgccgagatactcaagcaaccaggttaacgcagggctcatatcattttgctgccatgtcagacaacatgcgctatccggaaaggggttttccagttctaatgctacccacttcccctcattaagccacggtttggcgaaatgtgttggcaccatccctatgcataatcctgcgctgatacaggttgcgctactttcccagtcaggcacgacaactcttttttggttatccagcaaccaggtaatacgtttaggtagcgttcggctggtgtcttcgcgcaccaagctcggccagttgcgcaacgtatcatcgctgaacgggccatccatcaacgccagcgggtggtgactggcaacaacgcaactccagcttagcatccccatatcccggaaggcataacgaccgcctaccggaatcgcgcgtgttgcgccaatcgccagttccacgcgcccgtcggaaagcgcatcccagacaccgttgaacacttcctgaaagacaagaagttcgacatcatcaaaatggcgataaaaatcaacgatcatctgccgtgtacgttctggcctgacaatattatccactgcgatagctaactgaccgcgccagccgttcgctatctgctgacattgctggcgggtgatctgcatttttttgacaacagagcgcccttctttgagaaaccacgctccagcagcggtcagctccacatcacggtgccgtcgttcaaagagcggcaccgccagccactcttccagctgacgcacggtatagctgaccgcagaaggaacgcgatgcagctcctgtgccgcagcgctaaaactaccattacgcgctaccgcatcaacaacttcgagactatattcactccacatagtctgcctgcaaaatttttgaaaccagtcatcaaatattaccgtttcacaacactaatttcactccctacactttgcggcggtgtttaattgagagatttagagaatatacatgcaacctgggaaaagatttttagtctggctggcgggtttgagcgtactcggttttctggcaaccgatatgtatctgcctgctttcgccgccatacaggccgacctgcaaacgcctgcgtctgctgtcagtgccagccttagtctgttccttgccggttttgccgcagcccagcttctgtgggggccgctctccgaccgttatggtcgtaaaccggtattattaatcggcctgacaatttttgcgttaggtagtctggggatgctgtgggtagaaaacgccgctacgctgctggtattgcgttttgtacaggctgtgggtgtctgcgccgcggcggttatctggcaagcattagtgacagattattatcctagtcagaaagttaaccgtatttttgcggccatcatgccgctggtgggtctatctccggcactggctcctctgttaggaagctggctgctggtccatttttcctggcaggcgattttcgccaccctgtttgccattaccgtggtgctgattctgcctattttctggctcaaacccacgacgaaggcccgtaacaatagtcaggatggtctgacctttaccgacctgctacgttctaaaacctatcgcggcaacgtgctgatatacgcagcctgtagtgccagtttttttgcatggctgaccggtagtccgttcatccttagtgaaatgggctacagcccggcagttattggtttaagttatgtcccgcaaactatcgcgtttctgattggtggttatggctgtcgcgccgcgctgcagaaatggcaaggcaagcagttattaccgtggttgctggtgctgtttgctgtcagcgtcattgcgacctgggctgcgggcttcattagccatgtgagcctggtcgaaatcctgatcccattctgtgtgatggcgattgccaatggcgcgatctaccctattgttgtcgcccaggcgctgcgtcccttcccacacgcaactggtcgcgccgcagcgttgcagaacactcttcaactgggtctgtgcttcctcgcaagtctggtagtttcctggctgatcagtatcagcacgccattgctcaccaccaccagcgtgatgttaagtacagtagtgctggtcgcgctgggttacatgatgcaacgttgtgaagaagttggctgccagaatcatggcaatgccgaagtcgctcatagcgaaagtcactgatctatatcgatatacttatacttaggctgctaacaaaattttgttgtatgattgaaattagcggcctatactaatttcgagttgttaaagctacgataaatattatgtttttacggggacaggatcgttcccgactcactatggatagtcatttcggcaagggttcctcctttccctctgttctacgtcggattatagactcgcggttttttctgcgagatttctcacaaagcccaaaaagcgtctacgctgttttaaggttctgatcaccgaccagtgatggagaaactatgagtagtagctgtatagaagaagtcagtgtaccggatgacaactggtaccgtatcgccaacgaattacttagccgtgccggtatagccattaacggttctgccccggcggatattcgtgtgaaaaaccccgatttttttaaacgcgttctgcaagaaggctctttggggttaggcgaaagttatatggatggctggtgggaatgtgaccgactggatatgttttttagcaaagtcttacgcgcaggtctcgagaaccaactcccccatcatttcaaagacacgctgcgtattgccggcgctcgtctcttcaatctgcagagtaaaaaacgtgcctggatagtcggcaaagagcattacgatttgggtaatgacttgttcagccgcatgcttgatcccttcatgcaatattcctgcgcttactggaaagatgccgataatctggaatctgcccagcaggcgaagctcaaaatgatttgtgaaaaattgcagttaaaaccagggatgcgcgtactggatattggctgcggctggggcggactggcacactacatggcatctaattatgacgtaagcgtggtgggcgtcaccatttctgccgaacagcaaaaaatggctcaggaacgctgtgaaggcctggatgtcaccattttgctgcaagattatcgtgacctgaacgaccagtttgatcgtattgtttctgtggggatgttcgagcacgtcggaccgaaaaattacgatacctattttgcggtggtggatcgtaatttgaaaccggaaggcatattcctgctccatactatcggtagcaaaaaaaccgatctgaatgttgatccctggattaataaatatatttttccgaacggttgcctgccctctgtacgccagattgctcagtccagcgaaccccactttgtgatggaagactggcataacttcggtgctgattacgatactacgttgatggcgtggtatgaacgattcctcgccgcatggccagaaattgcggataactatagtgaacgctttaaacgaatgtttacctattatctgaatgcctgtgcaggtgctttccgcgcccgtgatattcagctctggcaggtcgtgttcagtcgcggtgttgaaaacggccttcgagtggctcgctaaaggctattctatcgccccctctccgggggcgatttcagatcaggcttctgtgcctggttgattcatggcattttctcgtgccgccagcacacgttctaccgtatctaccactgcctgagtttgtggatcgatttcaatgttgacgcgtgcgccaagttttttcttcccaagagtcgtgcgttccagtgtttcccgaattaaatggacgcaaaaacgcgttggcgtgacttcgccgacggtcaggctaataccgtcgatgccaataaatcctttgtacagaatatatttcatcaactgactatcctggactttaaaccagatctggcgattattttcactggttaatattttcgccacttcagcagtggtcataatatgaccactcattaagtgtccgccaatttcatcactgaatttcgccgcacgctcaacgtttacccaatcccccacttttaaatcgccaagattggtaatgcgtaacgtttctttcatcaggtcaaaactgacatggttgccgttaatttccgtcacggtcaggcagcaaccgttatgcgccacggaagcaccggtttccaggccgtccagcatgtggtcgggtaactccaccacatgcgtacgaaaatttggtttctcgtcaatgctcaccagttttgcggtgccctgtacaatccccgtaaacatacttacaactcctgaaatcagttaagacattctgttcagcacaatagcaggtggaaaacgcccttaccagtgaaggggtaagaatggctattttttcactggagaattaataaatcctcgctacaatagactgaatttcccctgcttcttctttttgctgcccattcaggcggctttttagtctctcatataactacaaataaaaggtgttcacgtgcagaagtatatcagtgaagcgcgtctgttattagcattagcaatcccggtgattctcgcgcaaatcgcccaaactgcgatgggttttgtcgataccgtgatggcgggcggctatagtgccaccgacatggcggcggtcgctatcggtacttctatctggcttccggcgatcctctttggtcacggactgctgctggcattaacgccggttatcgcgcaattaaatggttccggtcgacgtgagcgcattgcgcatcaggtgcgacaaggtttctggctggcaggttttgtttccgttctcattatgctggtgctgtggaatgcaggttacattatccgctccatggaaaacatcgatccggctctggcggacaaagccgtgggttatctgcgtgcgttgttgtggggcgcgccgggatatctgttcttccaggttgcccgtaaccagtgtgaaggtctggcaaaaaccaagccgggtatggtaatgggctttatcggcctgctggtgaacatcccggtgaactatatctttatttatggtcatttcggtatgcctgagctcggtggcgttggttgtggcgtggctactgcggcggtgtattgggtcatgttccttgccatggtttcttacattaaacgcgcccgctccatgcgtgatattcgtaacgaaaaaggcaccgcaaaacccgatcctgcggttatgaaacgactgattcaactcggtttgccgattgcgctggcactgttctttgaagtgacactgtttgccgtcgtggctctgttagtgtctccgctcggtattgttgatgtcgcaggacaccagattgccctgaactttagtagtctaatgttcgtgcttccaatgagcctggcggcagcggtaactatccgcgtaggttatcgtctgggtcagggcagtacgctggatgcgcaaaccgctgcgcggaccgggcttatggtgggtgtctgtatggcaaccctgacggccattttcacggttagtctgcgggagcaaatcgccctgttgtacaacgacaatcccgaggttgtaacgctggctgcgcatttgatgttgctggcggcggtatatcagatttctgacagtatccaggtgattggcagtgggattttgcgtggttataaagatacgcgttccattttctatattacctttacggcttactgggtgctgggcttgccaagcggctatattctggcactgaccgatctggtcgttgaacctatggggccagcaggcttctggataggctttattattggcctgacgagcgcagccattatgatgatgttgcgtatgcggttcctgcaacgtctgccgagtgccatcattctgcaacgagcatcccgctaataaagacaaggcgcaaccttcacgggttgcgcctgtatttttacgcaggctggagcgttgcgccaatcccgtcttcgtctggctgtaatttcagagcgttacacagagtttgccgactggcatctgttatctcaacgtgtatatccccggtaacttcccctttcacattgatgaagtcaggactaatttcttttgcactggtttgcaggcaaatcgctccctctccgcgcaggcgtttcactttcagttgcacatgcgttgccgcatcagtgatcagccacagttttccaccattcagattgatgttaccaacaatgaaagtgacactgtcaccttttaccgtactgccgtctagaatcaacacaccgccctgctgtacagtaatcgtactttgttgcagctctgcgccataaccaataatcatactagcgccgtccagtaatgcaacactcccggtcagttcaaccggtgcgcgatcttcctctacgacaaaattttcgtccgcgctggtgggactcaacaggatcactgtcccaccttgtattaccgcgttttccagcgtaccggcatgcacttcagcccgaccacccacattcacggacaggttttgcgtcttaccggaactgtagagctgaaggccatccgtccccagacgataaatggatccattctcaacaatagtgtcagagtcttcaccaccgagattattcatggtgccaccagcaagcaacgtatcactggctttcccggccagcataaaaacgccgccctgattaatctcacaattgctggcttccccacctggatacaccaacaattcaccaccttcatctaccacgaccgcactggttgtcccattaaccaacaggccgccctcttgatcgagaatgattttttccgcgcgatgtccttccagtacacgcaggttaccgccattttccagcaacaaaccgcaggcataacctttatcaacgctgaattcaccttcgggatggcggccattaaccgtagcgagcgtagagagactaattgcgcctccctcggactgaacaatatctgtggcaatggcaccatcgctgacgcttagcgtgccattgttaccgtactgtgtgcatttggcgatcccaccggttgccactttcaaccagccagcccccgtgaccacggtattttcggctcttccgccagcttcaacaatcaactcgccttcagtaagttgcgtcgcgccaatgacctcgccggtcttaacaatttgcacgttcccgtcgctcatcaagtttttcgcatcagatcccatgatttattcctttgctgcatctgtgtgcctttattgctacctaagtgtaaaggctacggaggatttatccacgacagatttgagatggtggcaaacaactctgtttaaactctgatacacgaattattgggttgtatcagatgtaaatgcgatcctgaataaaaatcacccttgcaaatcaacaaaatatagccaatttgcttaaaagctctgcaaacggtcgaaatagcgcagaaaattacgttttgcctcttgccaccttcccactctgccgctaatattcgtccccgttgtcacctacaacgttgcgttcatagctcagttggttagagcaccaccttgacatggtgggggtcgttggttcgagtccaattgaacgcaccatcctgcgtccgtagctcagttggttagagcaccaccttgacatggtgggggtcggtggttcgagtccactcggacgcaccagattttcttaatctggtcttctcctttttccctctgtttcttctctgtatccaatacgttaaaagatttacactgtcttcgtatgcgttatcagaaggagaatcgctatggcaactttgttacaacttcattttgcttttaatggcccatttggcgacgcaatggctgagcagcttaaaccacttgctgagagcattaatcaggaacctggttttctgtggaaggtatggacagaaagtgaaaagaaccacgaagccggtgggatctaccttttcactgatgaaaaaagcgcccttgcctatctggaaaaacatactgcccgactgaaaaatctcggcgttgaggaagttgtcgccaaagttttcgatgtcaatgagccacttagtcaaatcaatcaggcaaaactcgcctgacagaatttaatcaagggcggttagcgcccttttcatccctgtctgaaatttctcaaattctaaaaatctcaaccaaacttatctgataacactaaattcgaaagaatgcgtacaggtaagtaacaatgaaaaaaattgctattgtgggtgccgggcctacggggatctacaccttattcagccttctacagcaacaaactccactttctatttctatcttcgagcaggctgacgaggccggtgtcgggatgccatacagtgatgaggaaaacagtaaaatgatgctggcaaatattgccagtattgaaataccgccgatttattgtacgtatctcgaatggctacaaaagcaagaagacagccatctccagcgttatggcgttaaaaaagaaaccttgcacgatcgtcagtttttaccgcgaattctgctgggcgaatatttccgcgatcaatttttacgactagtagaccaggcacgacagcaaaaatttgcagtggctgtttatgaaagttgccaggttaccgatctgcaaattacaaatgctggcgtcatgctcgctacaaatcaggatttacccagcgagacgtttgatttagcggtgatcgccacgggtcacgtctggcctgatgaagaagaagcaacccgaacgtattttcccagcccgtggagtggcctgatggaagcaaaggtcgatgcgtgtaacgtgggtattatgggaacatccttgagcggactggatgcggcaatggcagtggctattcagcatggtagcttcattgaagatgataaacaacacgtcgtttttcaccgcgataacgcaagtgaaaagctaaatatcacgttgttgagccgcacgggtattttacccgaagccgatttctattgccctattccctacgagcccttacacatcgtcaccgatcaggcattaaatgctgagattcaaaaaggcgaagagggccttttggatcgggtatttagattgatagtagaggaaatcaagtttgctgatccagactggagtcaacgcatagccttagagagcctgaatgtcgattcctttgctcaagcctggtttgccgagcgcaaacaacgcgacccatttgactgggcagaaaaaaatctccaggaagtcgaacgcaataaacgagaaaaacatactgttccctggcgttatgtcattctgcgcctgcatgaagccgtacaggaaattgttccacatctgaatgaacacgaccataaacggttcagtaaaggccttgcccgggttttcatcgataattatgcggcaatccctagtgagtctattcgtcgcctacttgccttacgtgaagcgggaatcattcatattctcgccctcggtgaagactacaaaatggaaattaatgagagccgcaccgtcctgaaaacggaagacaacagctacagctttgacgtttttattgatgcccgcggacaacgtccgcttaaagtgaaagatatccctttccctgggctacgcgagcaattacagaaaacaggggatgaaatccctgatgttggcgaagattatacgttacagcaacccgaagatattcgtgggcgcgtagcgttcggcgcgttgccctggttgatgcacgaccagcctttcgttcagggacttacggcatgtgcagaaattggtgaggcgatggctcgggcggtcgtaaagcctgcatcccgtgctcgtcggcgtcttagctttgattaaaggtaaagctatcagcactcaacaaactgatgctgttcattaagacgatagcggactccggctcgaatattgttttcaccttcaatggcgacggcgaagcgaactctttcgccgtcatgatatgccagtgcggcgcttcctcctggcccgagaataatactgtcgaccacgcccgtgctcactaccgtactattttcaccgctggcaatgatgtgtacattgtcgccgctgttggcaattctggcgtttgcgccaaagctggcgatttgcaccaggtcaccattactggcgacatgacaccgttcacccaatgtacaaacgcgtactcgcattccggtattcgcaatccgactgctatctccagcgctgcttatccggctagaattaccggttacagcaacccgtgcgcgttcaccggagctgccaatgtgactgttaaagccgacacttccaatccgcacgctataacccatactggcaatttgcgcggcatacccagcggttgcgattctggcgttatcctcacaacagccgatgcgagcatgatcgtcgctgcgggcaaactgactgcaaaatggtctctctccggggtctgtggccagtttttgcatagaggaaacttcctgatgcgcgaagttttcatccgccagccattttttccacgcatactcaaccagactctccgcccagtccgtatatccttcctcaatcagtgcatgatgaatatcggcataactaccgccgcgtgggaaatggcgcaggaaccagcgatacatcaccgctccgatacgccattctcgcaggtctgcttgtgtaatgatcattcgttagtgccggtgatagccatcgaccatgcttttaaaggtttcgtgtggcgtacgccccgtggtgcaaagataaagatgaccgaagataaaaaagaggcttataaatgccagagcaaaatgtgtctgcaataaccagtatcttacgccaggaaacacatctcccacggcttgcggatagagacacagcagccccgtcaatagtaacaacggcagcaatccatacatgacaccaacataggcgacctgctgtaagggattaaatttagactgggttgttgccgggaaaggatgttcttccccctgcataatgccaaacaaataaaatcgcgtttgttttgccgctcgttccagccacccctgacgacgaatgcgatagtggtgaccattatccccaacggcattgatcagcacaaagccgagccagcatgccagtaacaaaaatccgcaaacttcatgcaccgcaaccagacttttaaccgcagttgcgcccaccatcgcaaagtgatttatcagcccactggccagcaacaatacaaagagtaacgcattgctccagtgccataatctgaccgctttgctgtaaagataaatcttctcaccatgatcggtggcacttttcttcacgccacgagcacgaagcaaggcatgcagccccagcaccaaccacatcccaaccagcaatactccggcaatgatcaaccacaccggccaaaattcgggagtgaactgtggcacatagttcgctaactggctctgaaactgttcagcatgttggctcgggttcatacattttcctttttaatcaaatgttgaccgaaccggcgatacagatgcggtttcccggcaccaggtagctgatattgatagtatttattttgctgcaaccacgcctgaatttctgggctatcttcgcgaccaaagatcaatgcgtgttccgggcaggcgctgacgcaaatgggcggaaagccttttgccagtcgggactcagcgcagaaatcacatttatctgccactttagtgacagggttaaggtagcgaacctggtacggacaagcgccaatgcaataactgcagccgatgcactggcttttttctacccgcacgatcccctgctcatcacgccagctcgcccccgtcgggcaaacgtcgatgcacggagcatcttcgcagtgctgacaactctggcgaaaaaagtgatactgcgtttcgttgtcgttatcggtgactggaatgtgtgctatgcttaaacggcttccctgagcggggacgtggttagttttacggcatgcgcgggcgcaaatattacagccattgcaccgactctcgtcatgaatcatggcataccgaacttccttttcttgcctcgtgttcgctaacagagaagacgcagaaccagtaaaaaagattactgttcccatccccagaacaaatttgcgtcgagtgaaggacatctgattatcccctaatgcagtggctgcaactgtccaccctatccatgacatctccctgaaatttcaggggttctgaaactgctctacctcgaaccattcgcataagccataagccttgccataggtcataaatcgctcgctaaacaagtacaacaccgccgtgctactctccacctgccgtatatcggcatattcaggtgcaacatccatcgcggcgatcgcggcttcaatctgcgcttcctggaagtaatatggcgcttgcatcagcatggcgactttgtaaggacgaggatacgtctggcactcaaaacgaacggcgtgtgcaatggcgcgacaaatgtcctgctccacaacttgcaaagacatcgccgcgtagttttcactcatggcctgcgtactgtaatagtaatcatccttgcttcccgtcaaacaagcgatatccgcgtagtctccgttctgcttaatgctttccagcaaaacactcagttcctcttctgcaaccaaatagggtgggctgagaaacacggcgcgcgccaccagctgcccagccgcagaatgctggcgaatgaactcagccaggatttcagcaggttctggttcggttaccgtatcaacggggtgacgcatcccctgcaaccattgccgcttcgcctcgtcaacttcgctgactttcgctaacggcaattcatcctgatggttcatcttacccattccttacgcaggcagtagattgtgtgctgccagatcggcggcaatatcttccagccccagacgctgcaatgtttcgcgggttggacaaccaagctgtgggtcccagcccatttctttgtagaacatcgtgaggctagcatgcatatcgtcacgatccattttgtcagtaccttcagtaaagaccgggatctgcggatccttgtcgaatacccaggaacagataagatcgtgttcattacgcatatctttggtttgcatcagttttaccgtgtaggcacgatgcaacgtaaaaatacgctctgcagctaaatctaatttttcctgagtcatctcttcgccggtgatcgctttgaagaatttggcttcaagcgccagatcgccccggtaattacggcttttcagcgggctaacggtcattggccagacccagttgcacagggtgacggcgttatgcaaacagacccgcaacaggctccactttgcatatttaatttttgcgtcattgattggcgtgtagtttttggtttcatcgtaagcatcttcagaaccaaaaagttctttcgccacttcacgttgcagtttcaatggcaagccggaaccaataaagttgatatgggtatgcgtcatgcagtcacggttgaacatacagttaacaatggaaccgacctgcgcactcgcttcattggcatggtgaaccggatagccaaacgggctccagagtttatttttcgcgtagccccagtactcttcacccaaattccagcgttctgcgatggcataactaccatcagccaggtgactcagctcacccacacgatgcgccagacggtagtaaaaatctttaatgaagttaacgtcacccgcttccagttgatcccagcgaatttctgcatactcttcagctggcagaacacgcttgaacacacctttgctgtaacaataagtaaagtcgcgatgcaactgcccgtagttacaccataggccgtagtcatcgaacaaattcagacccaccaggttaccaatcacacgaccatcgtctttatcttcaaaatctttcggcccgttcgggaagatggtggtatggacaaagtttgctacacaagtgttaccacctgtgctgggcacgccaaactctttcacccgaggaatattcatttgggtcatacaacggatcgggcaagagtggcagccgctcatttttactgtgtatttctctgccgccggtcctaagtcaaaaacggatttataggtacgaaagccgaccgtattctgattgcctggcggaatttcacccgtttcaatcggaccaccttcagccgcgccccaaaacagccctttacgtgctgtccagcgactcttgggatcactatactctgcccagctttgtggcgtacttggcacgacatggttgttattcgcaccaataagttcagtcatcatgtaatcattgagacgcttcatctcctgacgatcggcaatgttgacccctttcgtcccttcaaccgcaatcgctttcaggtttttgctacccattattgcgccagttcccgcaccgccgctgtggttacggctattcaacatgccagagagaggaacaaggttttccccagcctgaccaatagccgccacacaggtttccggactggtcaatcgacaaatttcttccgtcgttgcgcgcgtcccttttccccataagaaatcggctttttccaggctaactttgtcatctttaatcttcagccataccggacttttcgccttcccttcgataataatgacgtcgtatccagcgaatttcatttgcgctgcaaaaaagccacccatatgggcatcgacgactaaatttcctttggtaaaagtagaaagactggtgatatttacgcgagaactacagggggcaccagatccagttaatgggccggtagcaaagactaatttattcgcttcatcgaaaggtttcgtgcctggcggtacttcgtcatacataattttgtagccgaagcccatgccaccgacaaaacttttaaacttactggaatcttcgagggtaatatttcctgtcgtgagattgactcttaatatattacctgtccaaccgttagccatgattttttcctttgcaagattcacacagtaatatctttccactcgataatttttaacgcccctgttgggcaggcgtttgcgcattcaccgcataacacacatttgctggattttttactttcggtatttacggtggccatcatccacgggcatgccgtagtacaggcgctacagccaatacagcgtttatgatcgacggtaatacagccttctttctgctgccaggtaatcgcaccaatcgggcagacgttcatgcattgcggctctttgcattgacggcaggtgtccgcggtatagttgagatcgccatacaggccgccgccagagccaaccccgttgtcgccaaagaaataattgcgatggattttgatacgggagaagaatgtccctacactgccatcgttgaagttggtacaagagatttcacagcggtggcaacccgtgcatcgcgctcgctgggtcaccagcacccctttgggggtatttatcaaccctactgtgccgctatcaatatcttcctgtttgcaacccaaaagactcagtaacgcaggggcaattgttagaccagcaaggccttttccacttatacgcaagaattctaatcgcgttaagccaatatctaatagtggacgatcaaccgggttcatttatttcgcatcctcttcgcaaacacagtgctgacaattcagcagcctgatattaagcattcaactaatacgctgctgactctgtccccaacaccagatattttccctaacccgatagtgtatgagaaaagattaacgccgataaactaatcctttatggttaggagaaaaaataatgtgattattctgagcccttaacattgatcgttatcaattaaaattacaaagcaagaaattataagtgaactgatatttattatcatttgaaataaatttaacttaagcgacaattatttgtgactttcattgcagaaaataaaaataacattatcgctataaattaaaatacataccgaaattcgtataatttcagcagttgttatttagaatgattaactggaccgcaactgaagcaagaatatcaggatgaagcttaccgcctcatcctgaatggtcattttaccagtgcgttaatgacggtttccatcgcctgcttttccagctcactgcgctgaatgcgtttattggctaatgctgtacgtaatacgcctgcgataacaatatgctttggttcctgccccagatcgcgcatttccagcacaactttaccgacaactctgcacatttctcggtacagttcatcctcttttgtccgatttcccattctttatacctatttatcatgccaactatcagcatatatcaatctaaccaattaaacaaaaatcaaacaaaatcagacaaataacgcgataaattattttaactgtagcaattgagcgatgatatatttatacaccggatgaactttcacttatcctcacactgacaacttcggcaccagacgttgcgcaaacagtgaagtttttgcgtaaccttttccctggaacgttaaatctttgataacaatttattgtctaacaagttgtatattttttgaaacgctgtttttgttttccttttggattaatttcagcgtataatgcgcgccaattgactcttgaatggtttcagcactttggactgtagaactcaacgactcaaaaacaggcactcacgttgggctgagacacaagcacacattcctctgcacgctttttcgatgtcacctatccttagagcgaggcaccaccactttcgtaataccggattcgctttccggcagtgcgcccagaaagcaagtttctcccatccttctcaacttaaagactaagactgtcatgaaaaagaccaaaattgtttgcaccatcggaccgaaaaccgaatctgaagagatgttagctaaaatgctggacgctggcatgaacgttatgcgtctgaacttctctcatggtgactatgcagaacacggtcagcgcattcagaatctgcgcaacgtgatgagcaaaactggtaaaaccgccgctatcctgcttgataccaaaggtccggaaatccgcaccatgaaactggaaggcggtaacgacgtttctctgaaagctggtcagacctttactttcaccactgataaatctgttatcggcaacagcgaaatggttgcggtaacgtatgaaggtttcactactgacctgtctgttggcaacaccgtactggttgacgatggtctgatcggtatggaagttaccgccattgaaggtaacaaagttatctgtaaagtgctgaacaacggtgacctgggcgaaaacaaaggtgtgaacctgcctggcgtttccattgctctgccagcactggctgaaaaagacaaacaggacctgatctttggttgcgaacaaggcgtagactttgttgctgcttcctttattcgtaagcgttctgacgttatcgaaatccgtgagcacctgaaagcgcacggcggcgaaaacatccacatcatctccaaaatcgaaaaccaggaaggcctcaacaacttcgacgaaatcctcgaagcctctgacggcatcatggttgcgcgtggcgacctgggtgtagaaatcccggtagaagaagttatcttcgcccagaagatgatgatcgaaaaatgtatccgtgcacgtaaagtcgttatcactgcgacccagatgctggattccatgatcaaaaacccacgcccgactcgcgcagaagccggtgacgttgcaaacgccatcctcgacggtactgacgcagtgatgctgtctggtgaatccgcaaaaggtaaatacccgctggaagcggtttctatcatggcgaccatctgcgaacgtaccgaccgcgtgatgaacagccgtctcgagttcaacaatgacaaccgtaaactgcgcattaccgaagcggtatgccgtggtgccgttgaaactgctgaaaaactggatgctccgctgatcgtggttgctactcagggcggtaaatctgctcgcgcagtacgtaaatacttcccggatgccaccatcctggcactgaccaccaacgaaaaaacggctcatcagttggtactgagcaaaggcgttgtgccgcagcttgttaaagagatcacttctactgatgatttctaccgtctgggtaaagaactggctctgcagagcggtctggcacacaaaggtgacgttgtagttatggtttctggtgcactggtaccgagcggcactactaacaccgcatctgttcacgtcctgtaatattgcttttgtgaattaatttgtatatcgaagcgccctgatgggcgctttttttatttaatcgataaccagaagcaataaaaaatcaaatcggatttcactatataatctcactttatctaagatgaatccgatggaagcatcctgttttctctcaatttttttatctaaaacccagcgttcgatgcttctttgagcgaacgatcaaaaataagtgccttcccatcaaaaaaatattctcaacataaaaaactttgtgtaatacttgtaacgctacatggagattaactcaatctagagggtattaataatgaaagctactaaactggtactgggcgcggtaatcctgggttctactctgctggcaggttgctccagcaacgctaaaatcgatcagctgtcttctgacgttcagactctgaacgctaaagttgaccagctgagcaacgacgtgaacgcaatgcgttccgacgttcaggctgctaaagatgacgcagctcgtgctaaccagcgtctggacaacatggctactaaataccgcaagtaatagtacctgtgaagtgaaaaatggcgcacattgtgcgccattttttttgtctgccgtttaccgttactgcgtcacgcgtaacatattcccttgctctggttcaccattctgcgcactctctacactaggcgcattgctggctgcgggagttgctccactgctcacgctaaccggataccctgcccgacgatacaacgctttatcgactaacttctgatctacagccttattgtctttaaattgcgtaaagcctgctggcagtgtgtatggcattgtctgaacgttctgctgttcttctgcgcttagtggtcgatgtacttcaacataacgcatcccgttaggctccacggaatatttcaccggttcgttgatcactttcaccggcgttcccgtccgcacgctggagaacaaggctttaatatccggtgcattcatgcgaatacacccactactgacgcgcaaaccgacgctgtccggcgcactggtaccatgaatgaggtattcgccattaccatgcgcgaggcgcagtgcgtaacgtcctagcgggttatttggtccggcaggaacgactggcggtaatttaatgccacgctccaggctacgctgacgaatgcctgccgtaggcgtccaggttgggttagggattttctgcccaacacgcgtttccatcaccggcgtttccagcccctgcaatccaatacctattggataaacctgcacaatattttctcccggcggataataataaaggcgcagctctgcaaggttaacgataatcccctgacgcggtgcatcaggtaataacagttgactaggaatagttatcgtcgtaccaggttttggcaccggggcgatagtgttattggcttcaaggatcaacattgccgcagtatcaaaacgtcgggcaatagcctgaaggtttttatccccttcttgcaccgtatacgtttgattttgcccaaccagtcggcttccggttggtggtagcggataatcaaccgcccaggcagcctggatggcgctaaaagcgccgataagcgtgagtgtaagcaaagacgcgcgtttcattgtaaacctcctgtatttgccggagactcacgctgaaacgtcggatggcgcttatgttcacctgaaaccaaaacactcctgtgcaggtcagtgtaaacattgaccatccggcaatgtgagccaaccggatgaaagctgtccttttagtttagctaagtgcagcggctttggcgcgaattgcgcgaatcatcgcttccagaccttgactacgagatggggtgagatgttgggtgagcgccattttttcaaaccacggacgcacatcgaaattgacaatatcctgcggcgtcatctgatcgtagagaataaagacgaccgcaataagccctttcacaatcgccgcatcgctgtcgccctgtaattcaataattccctgggcattctggcgcatgacaatccacacctgactctgacagccctgaatgctattttgtggacttctgtcttcgtcgcgtaattctggcagacgctggcccagctcaataatgtagagatatttctcttcccagttggcgcagcgtaaaaaattacgcagcaacttttctttatccggcaataaagccatagtgcctccctgttatcccagcaaacggtgaatacgttgcaggccggtcaccagacgatccacttcttcatgggtgttatacatggccaggctcgcccgacacatcgcagggacgttgtaataggccatcaatggcattgcgcagtgatgtccggtacgcacagcaatgccgtaattatcgagaaaactgccaacatcataggcgtggtgtttaccgagattaaaagcaataacgccaagcctgttttgtgggccatagagagtgagatccggtacagattccagctgacttagcgcataatgcatcagattctgttcatactcggctatgttattaagccccagcgcgctaacatactccagcgccgcgccaagaccaatgatgcccccggtattgggtgtaccggcttcaaaccgccatggtgctttggtccaggtagtgccttcactcaggctgacggtggcgatcatagaaccgcccccttcccacggcggcatctcctgcaacaaggcttctttcacataaagaatgccaattccggtggggccatacagtttatgcccggagaacacgtaaaagtcgcaatccagcgcctgaacatccaccggatgatgcatcaccgcctgagcgccatccaccagcacttttgcgccatgctggtgcgcaagcgtgatcatttccgccagtggattttctgtgccaagcacgttggagacatgagtaattgccagcaggcgagttttctcatcaaacagcgtaggcagcgtctccagttgcaacgtaccatcgggattgagcgggatcacacgcagctctgcgccaacgcgtgcgcaaagcatctgccagggaacaatgttagcgtggtgctccatctgactgatgatgatgttatcgcccgcccgcacgttgctgttgccccagctattggcgaccagattgatcccttccgtcgtgccgcggacgaacaccagctcttccgcgctacgggcattaataaacaggcttgcccgcttgcgcacgttctccattttctcggtcgcctgggcgcttaaggtatgaataccacgatgcaccgccgcgtagccatgacgataaaactcggcctcggcgtcaatcacctggctcggtttctgcgcactggcggcgctgtcgagataagccagcggcaaaccgtttacctcacggctaagcaccggaaagtcggcccgcactttgtcgacggaaaaaatcatcttgcacctcctggcagccgttgaccgattcgggccagcacctgctgtttaagcccctcatcacgcagtgcttccgtcagttcggcagcgaaggcgtaaatgatcatctgctgggcatcctgctgattgatcccgcggctgcgcagatagaatatctgttcatcatcaatacgccccaccgtcgcgccgtggctgcatttcacatcatctgcatagatttccagctgcggtttcgtatccacttccgccagtttgcccatcagcagattgttgttggtcatctgaccatccgttttgatggcgtgctgcgcgacgttgatcaaaccgttaaataccgcgcggcctttgtcgctgacgatagttttgtgcaactgtcggctgttacaaaaacctttattgtgttccagccaggtacgggtatcacacacctcgtttttcaccggcatcgccaggctattgatccgcagcgtgctgttttcgccattgagttgcgtactggtgttgtgtcgtaacactgcgccacccagcaggaaactgtggctaaatgcggtggcatcctcagccagcaacaaatcgttatgagcaaagtggtgactgagcgggttttcaaacgccagcttgatatgctgcaagtgggcattcgctgcgacgttgatagtgaaccgtgccccggtaaaatgacgagcatcattcaggctgacaaaatgttcgatcaccgttgcttcggcaccttccgccagatccagatgatgtcggtaatgggcagtgttcacctcttcacctgccacgccctgggtgatatgcattaacagcaatggctttgccggccgttgaccgcgcttcacggcgatatgcgtcacgctttgtgccaggctttccgtcaaatgcagaaacacttccgcctgaatagcgtcgggtaaaccctgacggtcgtcgttaatgctcacttcatatccgctgccttcagttgcatcgctcagtgcgggcacgtaacgcccatcgacaaacaccagccgcacggagtctaacgttaacgctaaggcatcacgctgctgtggggatatctctcccgcaatgctgacaaactggctattgatcagcccttccagcggcgtatatttccagttttcatgtttacgtgtcggcagtccggtacgcagcaattgttgtaaatgctgctgtgcttgcggggagcgttttgtcccttcagcttcaaacaagtgatgccactgttgcagcgcgttactgctgttcggtaagccagccataaccctgctcctccagttgtttgaccaacgtgaaatcgccggatttcacaattcgtccctgatatagcacatgaacgtaatcaggcttgatgtagtcgagaatgcgttggtagtgcgtaacaatgatgaaactgcgcttgccatcacgcaggctgttcacgccatcggcgaccacttttaatgcgtcaatatccagcccggagtcgctctcatcaagaatgcataactccggttccagcaccgccatttgcaaaatatcgttgcgctttttctcgccgccggaaaaaccaacgtttacgctacgggttaataaatcttccggcatcttcaggagagcgattttctcttccatcaaatcctgaaaatcaaagcggtcgagcgtttcctggccgcgatagctgcgcaccgcattaagtgccgtttgcaggaaaaactggttactgacacctggaatctccaccggatactggaaggccataaagatgccttcgcccgcgcgatcttccgggctcagcgcaagcaaatctttgcctttgaactcaaccgtgccgcccgtcacttcataatcttctcgcccggcaagcgttgcgcttaaggtacttttgccgctaccgtttggccccataatggcgtgaacttcgccgggatgaacgtcgaggcttaatccgcgcaggatagctttatcttccacgctgacgtgtaaatctttaatacttaacatgtttattccttatccgacgctgtgttcaagactgatggcgaggagtttttgtgcttcaacggcaaattccaacggcagctcgctgaacacgtctttgcagaaaccgttaacaatcatgctgatggcgtcttcttcgctgatcccgcgttgcaggcagtaaaacagttgatcttcaccaatacgacttgtcgttgcctcgtgttccagttgcgcactattgttacgacactcaacatacgggaaggtatgcgccccacaattagcgccaatcagcatactgtcgcactgagtgaaattgcgcgcattggttgccgtcggcatgattttcactaagccgcgataactgttctgactatgtccggcagagatccctttgctgataatggtgcttttggtgtttttaccgatgtggatcatcttggtgccggtatccgcttgctgatgaccgctggtcagcgccacactgtaaaactcaccaatggagttatcgccgcgcaaaatgcagctgggatatttccacgtaatcgcactcccggtttcactttgcgtccaactcattttgctgttttcgccttcgcacaaagcacgcttggtgacgaagttgagaataccgccggtgttgttatcgccaggaaaccagttttgtaccgtggaatatttcacctcggcgtttttatggatgatgacttccaccactgccgcgtgtaactgatagctgtcacgcaccggagcggaacagccttcaatgtagctgacgtagctgtcttcgtcggccaccagaatggtgcgctcaaactgcccggttttttctgcgttaatgcgaaaataggtggaaagttccatcgggcagcgcacgcctttaggcacataaataaacgtaccatcagaggctaccgccgcattaagcgcggcaaagaagttgtcattccccggcaccacggtgccgagatatttacgcaccagttccgggtgatcgtggatcgcctcaccaaaggaacagaaaataattccctgctccgccagtttttcgcgataagtagtggcaacgctaacactgtcgaaaatggcatccaccgccacctctttgccttcccgcacgggaacgcccaactgctcaaacgccgcctccacctctttacttaaaaaggcgttcgcgccagtttgctgcaccgcgccaggttcagacgcgcaagtgtcgtcacaattaccgcagcttggtgcactgtagtagctgtaatcctgataattcagcttgtcgtagtgcgctttcaaccagtgcggttcttccatctccagccatgcgcgataggcgtttagacgaaactccagcatccactccggctcattacgcttcgcgctaattgcgcgcaccacctcttcgtttatcccctttgccagctcatcggtggctaactgggtgaagaatccttctttataattcagcgggccgccggtccaggttttgacatcgtcagttgcttcagtattacgagacatagtaccgcttataccccaaagctttcgccacagccacattcattctgggctttagggttgtgaaatttgaatatctgattaagtccttcacgaacgaaatcgacttccgtgccatcaataaacggcatcgcttgcagcgggacaaacagcttcgcgccgtcgtgttcaaacagcagatcgtctttgtccggctcgctaacactgtcgagcacatagccaaagcccgcgcagcccgtttgcttcacgcctaagcgcacgccgaccatacccggctgctttgccaccagctcacggatgtgtatcgccgctgcgggtgtcagcgttaagccttgccaggcgaaatcttgtgggttaaaggttccactatgcatgtccatcgatttacctcacttcatcgctttcagcgtataacagcatgttagtgataatgattatcagttcaacccagcaaacgcaggggctttaccgtaaaacatgctttttgcctgcttttaataagcatagaccctgatgtgtgggttaacaggcacgctaagaattaggtatctcattgttagataatggttattatctaaggagcattaaggctgtgatgaaaaagaaaaagttgtattgaaaatgactatttaagagataggtaaaaaagtgcagcgttcagaaataagaaaacccttaagtctgtgcgacacaggcttaagggtttctaccccatccggcgcttatctccggcactctcagtggcttagctcttgaaggggcgataagaataatctcataaagctaacccgccgttttaacacaaactgcgattagtattatttttgaacaatatcaggcggtagataagcagtattaagaaggtcatcgaacctggacggaggttaatccaggtcgatttggcgaacttgcggcattaagtcaggatcaatgcacgcccagacgccaggcaaagtagatttcttcttttaattcagcagaagagagagtaagcaggtcagcaaattcaagttctagttgtttcagacgtttgagatattgggcaggactaagattgctctggtcacggcgtaaaaattcaatggccagctgggtgggatcaagttgagtagacatagcatcctcgcttttagacaagacctgcacagtataccaccgtttactgtgcagataatgaccaaaagcaatatgcgtcacacttttctggtgacaacgtcacaaaatggcggtcgtcaatcgactgctacagcacaaacgccctttctcatcgaagatttcaatctgccagacctggtgacggctaccgagatgcaacggtttgcatacgccgcgcacccgcccttctcgtgcgctgcggacgtggttagcattgatttccagaccaaccactttttgctcaccttcggtacataaataaccggcaacggaaccgatactttcggccagtaccacggatgctcctccatgcagcaacccgaaaggctgctttgtccggctgtctactggcattgtcgcttcaagggtgtcatcaccaatatgttcaaagcgaatatccaggaaccccaccatgtttccttcacccatagcattcagtgcttccagggtgattttccgtttccatatcatttaataatctccagtaaagcctgcacaggatggcgtacccccgtgccttcaacccgttttacctggctacggcaggaatatccggtcgccagacagcggttacgcggcagtcgctgcatagcctgatgccaggataactcatagatcccgaggctattttcatggtttttcgcttcatgtccgtaagtccctgccatgccgcagcaacccacgctgacattttccagtttcgcgccaaaacgggcaaatatcgcggcccattgtgctggcgcacccggcaaggcggtaacttcggtacagtgaccaaagaaataccaactttcaccgctgactgtagccactggctgactctcaagtgcgcttgccagccattcattcgccagtaagacgttaaactcgccacgctcctcgcccagcgccagtttatattcatcgcgataacaaagtaccagcgccggatcgacgcccaccattggcatacccagcttcgccatacggttgaggaaatccgccgtctttttcgccgtcttcgcaaaacgattaagaaaacctttaatatgctgggctttgccatttgggctaaatggcagtaacacaggctggaaacctaatttttcgaccagacggacaaaatccgccaccacttgcgcatcgtaatagctggtaaaggggtcctgcaccaccaacactgtgcgcgctttctgctctgcattgagagattcaagctgttccagcgtcatgtttgcgctgcgatgccccaccatttgttgttgtaggctggggacgctcagcagcggcaaatcaaccatgccgatatgtttttcgctgagtttgcgcaccagcggctggttaatgaagaagttaaaggttttcggcgcgcgtgccatcagcggcgcgtagctctcgaccgtagcgacgaggtggtcgcgcagcgggcgtaaataacgggtgtgatagagctgcagaaaacgagagcgaaactccggcacatcaattttgatggggcactgggtgctacacgctttacaggccagacagccgctcatcgcctctttgacttcgtgactgaagtcatattcgcctttattcgcatgccagctattgcgcgtgcgggcaattaacgtccgcaaactgacgccggattcaggcagttcttgttccagtttgagtggatcaacgccgcgatccgccaacaaacgcagccattcacgcaccagcgttgcgcgccctttcggactatgaatccggttctgggtgatcttcatgctcggacacatcggactacgggcatcaaagttgaagcataaaccgttgccgttacactccatcgcaccgcgccactgctggcgtaccgcaatggggatctgccgatcgaatgtaccgcgcttcaccgcgtccactttcatcatcggcgcatcgagaccttctggcgggcaaatcttccctgggttgagtcggttatgcgggtcaaatgccgctttcactttgcgcagttctgcaaaaagttcctcaccgaaaaacgccgggctgtattcagcgcgaaaacctttgccgtgctcgccccacaacaaaccaccgtatttcgcagtcagcgccaccacgtcatcagagatttgcttcatcaaaatctcttgttgaggatcgcacatatccagcgctggacggacgtgcaagacacctgcgtcgacgtgaccgaacataccgtagcttaagccgtggctgtcgagcagcgcgcgaaattcagcaatataatccgccaggtgttccggcggtacgcaggtatcctcagcaaacggaattggcttagcggcacctttggcattgccaagcagaccaacggcttttttgcgcattgcatagatacgttcaacccccgccagctcacggcacacctgccagccgatgacacctgcttgatgactggcgatcagctcatccaaccgcgcacagagtgcatttacccgctcatcaatcagcgcctcatcatcaccagcaaattccacaatgttcagcccgagcatctcttggtcaggcacatcggtaatcaactcgctgacggaatgccagacaatatcttcccgcgccagattcagcactttactgtccaccgtctctacgctaagcgcccgcgcctcaaccataaacggcgcgttacgcagcgcagagtcaaaagagtcatatttgacgttcaccagacggcgcactttaggcaagcgtgtaatatccagccgcgcttcggtaataaaggccagcgtcccttcactacccgtcagaatgcgcgtcaggtcgaactcggtcatctcatcgttaaagacatgacgcagatcgtaaccggtaagaaagcggttaagtttggggaagttgtcgataattaactggcgttgctgacggcaacgttgataaaccgtgttataaattcgcccgattgtggtattggatttacccagcgtttccgccaattcgacgggtaaaggttgcgtatcgagaatatcgccccccaacaacaccgcgcgtacgccaagtacgtgatcactcgttttgccatagaccaggcttccctgaccggatgcatcggtattgatcatcccaccgagcgttgcccggttgctggtgctaagttccggcgcaaaaaagtagccgaacggtttcaggtactgattgagttgatcttttatcaccccggcctcaacgcgcacccagccctcttcagggttaatttcgatgatgcggttcatatggcgggacatatcaacaataatcccctggttgagcgcctgaccgttagtgccggtgccgccgccgcggggggtaaagatcaggctactatagcgttcctgcgcggcaagacgggcgatcagcgccacatctgcggtactacgcggaaataccaccgcatcggggagaagttggtaaatactgttgtcggtgctcattgtcagacgatcggcataacttgtcgccgtatcgccggtaaaaccttgttgctccagctcttgcaaaaaattaagcaccagttgaacgacgccgggtgcctgggaaatctgtggaatcattatattgaccctttcctgcggtctgtgatgtaggtcgatacactattctttcaggctgctgcaatagcgcactgaaaggtgatgtttgtttactctatggatttcgtgttgcaggaaggcggcaagcgagtgaactccaggagcttacaatagtaagtgactggggtgaacgaacgtagccgcagcacatgcaacttgaaatacgacgagtaaatcgtttgcgtgttgcctgagttgttgtaccacatttttttctaacacgcccatcagaattaagggcagaatcggcctgttaaaaaccgctgaaattgctcatcattatgcaggtgagtttcgcgtgttcacgtcgcgtcgacgatttgacgcacaaaaaaggtgaaaagtagttatggtaaatgttcgtcagcccagggatgtcgcacaaattctgcttagcgtgctgtttttagccatcatgattgtggcatgtctgtggattgttcaaccctttattctcggctttgcatgggccggtacggtggttatcgccacctggccggtattgttacgtttgcaaaagatcatgtttggccgccgctctctcgccgttctggtgatgacgctgttattagtgatggtgtttatcatccctattgctttgctggttaacagtatcgtcgacggcagcggcccgctaattaaagccatttccagcggtgacatgacgttacccgatctggcgtggcttaataccattccggtgattggcgcgaagctgtatgcaggctggcacaacttgctggatatgggggggacggcgatcatggcgaaagtccgcccttatattggcaccaccaccacctggttcgttgggcaggcggcgcatatcgggcgctttatggtgcattgtgcgctgatgcttctcttcagtgccctgctgtactggcgcggtgaacaggtggcacaaggcattcgccattttgcaacccgtctggcaggcgttcgcggagatgccgccgtgctgctggcggcacaggctatccgcgcggtggcgctgggtgtggtggtgacggcgttagtacaggcagtgcttggcggtatcggcctcgccgtatccggcgtaccttatgcaacgttgctaacggtgttaatgatcctctcctgccttgtccagcttggcccgttgccggtactgattccggcgattatctggctctactggactggcgataccacctggggaacggtattgttagtgtggagcggtgtggttggcacgctggataacgtcatccgcccaatgttaattcgcatgggtgccgatttaccgctgatcctgattctctctggcgttattggtggtttgattgctttcgggatgatcggtctgtttattggtccggttctgttagccgtttcctggcgtctgtttgccgcgtgggtggaagaagtcccgccgccgacggaccaaccggaagaaattctcgaagaacttggcgaaatcgagaaaccgaataagtaatttctcatcaggcggctctgccgcctgattgttaaccaccgctaattgatatttgcttgctcttccccatattttcctgcttaccgccattcagctggtagtacctgtcgcaaattctttacagtttttaaactaatgagacgaatctgatcgacgcaaaaagtccgtatgcctactattagctcacggttataaatcaacatattgatttataagcatggaaatcccctgagtgaaacaacgaattgctgtgtgtagtctttgcccatctcccacgatgggcttttttttaacatttttccgcttcgctacctcgcccctcactctttccaataatgttgcacaagatactgtgactctcttcaagccgtcagcaggctgataatgttatttatattttattgtttatttcatgcagccattacacgatgaacgcttatgaactccaggcactccgccatatttttgccatgactattgatgaatgcgcgacctggattgcccagaccggtgacagtgaaagctggcgtcagtgggaaaatggcaagtgtgccattcctgatcgtgtagtcgagcaactgttggctatgcgtcagcaaagaaaaaaacatcttcatgccatcatagagaaaataaataaccgcatcggcaacaacaccatgcgttttttccccgacttaaccgcatttcaacgagtctaccctgatggcaattttattgactggaagatctatcaaagcgtagctgctgaattatatgcacacgatctggagcggctttgttaatttttccacagaaaggaattgtcgttgttacaacaataatgaacggatgctgacacaacatcgcttcactttttaaagcacctttgctaagtagaacctatgaaaaatccctatttccctaccgcacttgggttgtattttaattacctggtgcatggtatgggcgtccttttgatgagcctgaatatggccagcctggagacactttggcagactaatgccgcgggtgtcagcatagttatcagtagcctgggcattggtcgattaagtgtcttgctttttgcaggattattatccgatcgctttggtcgccgcccttttatcatgctcgggatgtgctgctatatggccttcttttttggcatcctgcagaccaataacatcattatcgcttatgtttttggctttctggcgggaatggcaaacagttttctcgatgcaggcacttatcccagtttgatggaagcttttccacgcagtcctgggacagccaatattttaattaaagcatttgtttccagcggacaatttttattaccgctaatcattagcctgttagtgtgggctgaactgtggttcggttggtcctttatgattgctgcaggcattatgtttattaacgctctgtttttataccgttgtacgttcccaccccatccgggtcgtcgcttacctgtcataaagaaaaccaccagctctacggaacatcgctgtagtattatcgatttagccagttataccttatatggctatatcagtatggcaacgttttatctggttagccagtggctggcacagtacggacaatttgttgcaggcatgagttacactatgagcatcaaactactcagtatctacaccgtgggtagcctgctttgtgtatttattaccgctccactcattcgtaataccgttcgcccaacaacattactgatgctgtacacctttatcagttttattgctctgtttaccgtctgcctgcatcccacattttatgtggtgataatatttgcttttgtcattggttttacctctgctggaggtgttgtgcaaattggcctgacgttaatggctgaacgtttcccttacgctaaaggtaaagctacagggatctattacagtgcgggcagtattgcgacctttactattccgttgattacggctcatctgtcccaaagaagtattgccgatattatgtggttcgataccgccatcgctgccatcggttttttactggcactgtttatcggcttacgcagccgcaaaaaaacgcggcatcacagcctaaaggaaaatgtcgctccgggtgggtaatgcaatattcttttcaggtcatgcaagatcttacggataaataactctttctgcgctaactaaggaaaatcgcgatcaaaaacaaactatgacatgcaatattcctggaaacataaactttatgccatgtacccagggaaaatcatcttcagtatagtaattatgtaaaccgtcggagaacaatacgtacggtaacgaaattatctttcagcaaggagctgtgaaaatgtctcaaaataaggctttcagcacgccatttatcctggctgttctttgtatttacttcagctacttcctgcacggcattagtgttattacgcttgcccaaaatatgagttctctggcggaaaagttttccactgacaacgcgggcattgcctacttaatttccggtatcggtttggggcgattgatcagtattttattcttcggtgtgatctccgataagtttggtcgtcgggcggtgatattaatggcagtaataatgtatctgctattcttctttggtattcccgcttgcccgaatttaactctcgcctacggtctggcagtgtgcgtaggtatcgctaacagtgcgctggatacgggtggctaccccgcgctcatggaatgctttccgaaagcctctggtagcgcggtcatactggttaaagcgatggtgagttttgggcaaatgttctacccaatgctggtgagctatatgttgctcaataatatctggtacggctatgggctgattattccgggtattctatttgtactgatcacgctgatgctgttgaaaagcaaattccccagccagttggtgggcgccagcgtaactaatgaattaccgcaaatgaacagcaaaccgttagtctggctggaaggtgttagtagcgtactgttcggtgtagccgcattcagcaccttttatgtgattgtggtgtggatgcccaaatatgcgatggcttttgctggtatgagtgaagctgaggcattaaaaaccatctcttattacagtatgggcagcttggtctgtgtctttatttttgccgcactactgaaaaaaatggtccggcccatctgggctaatgtatttaactctgcactggcaacaataacagcagccattatctacctgtacccttctccactggtgtgcaatgccggagcctttgttatcggtttcagtgcagctggcggcattttacagctcggcgttagcgtcatgagtgagttttttcccaaaagcaaagccaaagtcaccagtatttatatgatgatgggtggactggctaactttgttattccactgattaccggttatctgagcaacatcggcctgcaatatatcattgttctcgattttactttcgcgctgctggccctgattaccgcaattattgtttttatccgctattaccgcgttttcattattcctgaaaatgatgtgcggtttggcgagcgtaaattttgcacccggttaaacacaattaagcatagaggttaaaggagttaattatggatgttaccgcaaaatacgaattgattgggttgatggcctatcctatccgccacagtttaagccccgaaatgcagaataaagccttagaaaaagcgggattgccatttacctatatggccttcgaagtggataacgatagctttcctggagcaattgaaggattaaaagccctcaaaatgcgcggaactggtgtaagcatgccgaacaaacaactggcgtgtgaatatgttgatgaattaacaccagctgccaaactggtgggggccatcaacaccatcgttaatgatgatggctatctgcgtggctataacaccgacggcacgggccatattcgcgccattaaagagagcggttttgatatcaaaggcaaaacgatggtgctgttaggggccggtggtgccagtacggcaattggcgcgcagggggcaattgaaggtttaaaagaaattaaactctttaaccgtcgggatgagttcttcgataaagccctcgccttcgcgcagcgggttaatgaaaacaccgattgtgtcgtcacggtcaccgatctcgccgatcagcaagcctttgctgaagccctggcttccgccgacattttaaccaatggcacaaaagtgggtatgaaaccccttgagaatgaaagtttggttaatgatatcagtctgttacatccgggacttctggtcactgaatgcgtgtataacccgcatatgacgaagttattgcagcaggcgcaacaagctggttgcaaaacgattgatggatacggcatgttgttgtggcaaggggctgaacagttcacattatggactggcaaagatttccctctggaatatgttaaacaggtcatggggttcggtgcctgacaggctgaccgcgtgcagaaagggtaaaaaatgaaaaccgtaactgtaaaagatctcgtcattggtacgggcgcacctaaaatcatcgtcagcctgatggcgaaagatatcgccagcgtgaaatccgaagctctcgcctatcgtgaagcggactttgatattctggaatggcgtgtggaccactatgccgacctctccaatgtggagtctgtcatggcggcagcaaaaattctccgtgagaccatgccagaaaaaccgctgctgtttaccttccgcagtgccaaagaaggcggcgagcaggcgatttccaccgaggcttatattgcactcaatcgtgcagccatcgacagcggcctggttgatatgatcgatctggagttatttaccggtgatgatcaggttaaagaaaccgtcgcctacgcccacgcgcatgatgtgaaagtagtcatgtccaaccatgacttccataaaacgccggaagccgaagaaatcattgcccgtctgcgcaaaatgcaatccttcgacgccgatattcctaagattgcgctgatgccgcaaagtaccagcgatgtgctgacgttgcttgccgcgaccctggagatgcaggagcagtatgccgatcgtccaattatcacgatgagcatggcaaaaactggcgtaatttctcgtctggctggtgaagtatttggcagcgcggcaacttttggtgcggtaaaaaaagcgtctgcgccagggcaaatcagcgtaaatgatttgcgcacggtattaactattttacaccaggcataagcaataatatttcggcgggaacaccctccccgccgaactaaaaaatatattcaatcgtatttaataaaaatatttcgtgagtctctgtgcgctaattctccatttggcgtagggaaaatcacatctgaatcaggaattaacaatgaaacctgtaaaaccacctcgtattaatggacgagtgccggtcctgagcgcacaggaagcggtgaattatattcccgacgaagcaacactttgtgtgttaggcgctggcggcggtattctggaagccaccacgttaattactgctcttgctgataaatataaacagactcaaacaccacgtaatttaagcattattagtccaacagggcttggcgatcgcgccgaccgtggtattagtcctctggcgcaagaaggtctggtgaaatgggcattatgtggtcactggggacaaagcccgcgtatttctgaactcgcagaacaaaataaaattattgcttataactacccacaaggtgtacttacacaaaccttacgcgccgccgcagcccaccagcctggtattattagtgatattggcatcgggacatttgtcgatccacgccagcaaggcggcaaactgaatgaagtcactaaagaagacctgattaaactggtcgagtttgataacaaagaatatctctattacaaagcgattgcgccagatattgccttcattcgcgctaccacctgcgacagtgaaggctacgccacttttgaagatgaggtgatgtatctcgacgcattggttattgcccaggcggtgcacaataacggcggtattgtgatgatgcaggtgcagaaaatggttaagaaagccacgctgcatcctaaatctgtccgtattccgggttatctggtggatattgtggtggtcgatccggatcaaacccaactgtatggcggtgcaccggttaaccgctttatttctggtgacttcacccttgatgacagtaccaaacttagcctgcccctaaaccaacgtaaattagttgcgcggcgcgcattattcgaaatgcgtaaaggcgcggtggggaatgtcggcgtcggtattgctgacggcattggcctggtcgcccgagaagaaggttgtgctgatgactttattctgacggtagaaacaggtccgattggcggaattactagtcaggggatcgcctttggcgcgaacgtgaatacccgtgccattctggatatgacgtcccagtttgatttttatcacggtggcggtctggatgtttgttatttgagttttgctgaagtcgaccagcacggtaacgtcggcgtgcataaattcaatggtaaaatcatgggcaccggtggatttattgatatcagtgccactagcaagaaaatcattttctgcggcacattaactgcgggcagtttaaaaacagaaattaccgacggcaaattaaatatcgtccaggaaggacgggtgaagaaatttattcgggaactaccggaaattactttcagcggaaaaatcgctctcgagcgagggctggatgttcgttatatcactgagcgcgcagtattcacgctgaaagaagacggcctgcatttaatcgaaatcgcccctggcgtcgatttacaaaaagatattctcgacaaaatggatttcaccccagtgattagcccagaactcaaactgatggacgaaagattatttatcgatgcggcgatgggctttgtcctgcctgaagcggctcattaacaggagtataatgatggatttttctttaactgaagaacaagaactgctgctggccagtattcgcgaactgattacgactaactttccggaagagtatttccgcacctgcgatcaaaacgggacatatccgcgtgagtttatgcgggcgctggcggataacggtatttccatgcttggcgtgccggaagaatttggtggtatccctgcggattacgtcacccaaatgctggcgctgatggaagtgagtaaatgcggtgctccggcatttttaattaccaacggtcaatgtattcacagtatgcgccgtttcggttctgcagagcagctacgtaaaacggcagagagcaccctggaaacgggtgatcccgcctatgccctggcgttgacggaaccaggtgctggcagtgataacaacagtgccactaccacttacacgcgtaaaaacggcaaggtctacatcaacggacaaaaaacctttattaccggtgcgaaagagtacccgtatatgctggtgctggcgcgcgatccgcaaccgaaagatcccaaaaaagccttcaccctgtggtgggtcgactccagtaagcccggcattaagattaacccgctgcataaaatcggctggcatatgctcagcacctgcgaagtctatctcgacaacgtggaggttgaagagagcgacatggtgggcgaagaaggaatgggtttcctcaatgtgatgtacaactttgagatggagcgcctgatcaacgccgcgcgcagcaccggctttgccgaatgcgcctttgaagatgccgcccgctatgccaaccaacgtatcgcttttggtaagcccattggtcataaccagatgatccaggaaaaactggcgctgatggcgattaagatcgacaacatgcgcaacatggtgctgaaagtggcatggcaagccgatcagcatcagagtctgcgcaccagcgcggcgctggcaaaactgtactgtgcacgtaccgcaatggaagtcattgatgatgcgattcaaatcatgggcggtctgggctataccgatgaggcgcgcgtctcccgcttctggcgtgatgtccgttgtgaacgtatcggcggcggtacagacgaaattatgatttacgtagcaggtcggcagatcctgaaagactatcagaacaaataatctgcaggcggcgcagcttcttaacaaactgcgccgccagatttatccaacaagacttaccggttgaggaaattcagataggatttcttgttccgcaaaacagtttttaaattgtctacggtaatcgctggggctacaaccgacatggcgcaaaaacagtttggcaaagtgatcgacattttcataacccacacgccaggagatctctgcctgacttaattcagtattagtgagactccattttgcttccgtcatacgccgttgaataacatagttaataggggaaatacgatactctttggtaaattcatggcaaatataactgacgctggcacgaaattttttgcttaactgttctaaagtgattttttcgcgataattattattcagatagaaaagaatatcttttatcagaacatcttttttaatatacccctgctcgctacgataagcatttttaaaattttcgtagtaaagaatggctaacgtataggcaaatgcatcccataagctagatgtttggctatttttactttgcggcaaaatcacacttagctcattaaataaggtttttatgacttcttttccctgccccgcggcaattaccggacaagaatgcggttgcagtagctgattttcctcagccccctgaaactgaaagccgtacagcgcacaggtacacgtcgttgccggatcgttaacgtcagaggccaccgcatgcagcctgccgcgttctatcaccacaatgtcatccgcatgtgcgacatataagctagaatcgatggtaaaccttgcaacccctttcttgacgtaaatcaactcggtttcattgtcatgaacgtgatgtccggactcccattttggatcatcgctaaatgcaaaacgactaagccgtggcgttttaccggcgacaaacagcgtttcactggcgttatcaaaacagcgttgatacatgacaacctccctattccatgagcaagcaaaaacaatatatgccggataaaatacggcgtgtattgcggttatacaaccgcgtttagcgagagctaaacaagattatttacactgaatgcaagattgtacggtcatggaataactatattgccgcaaattgcacttttgttttagcgatcgcattttttttgcaagattgttggcaaggaaaacagcttgctccgtcgaaaaccccgcaccgctatcgcacactattttcaggccatttttaccttccatcggagatggttccgtatgcgactcacaggagaaatcatgaaaataataacctgctttaagctggtgcctgaagaacaggacattgttgtcactccagaatacaccctgaatttcgacaatgccgacgccaaaatcagccagttcgatctcaatgccattgaagctgcaagccagctcgcaacagatgacgatgagatagccgcgctgaccgttggcggcagtttgttgcagaacagcaaagtgcgcaaagacgtgctatcccgcgggccgcacagcctgtatttggtgcaggatgcgcaacttgaacatgcactgcctctcgataccgcaaaagcgctggcggcagcaattgaaaagatcggcttcgatttactgatctttggtgaaggttccggcgacctttatgcccagcaggttggcttgctggtcggagaaattctgcaacttccggtgattaatgcagtgagtgctattcagcgtcagggcaatacactggtgattgaacgcacgcttgaagatgatgttgaagttattgaactctctgttccagccgtgctctgcgtcacctccgatattaacgtgccacgcattcctagcatgaaagccattctcggcgcgggtaaaaaaccggtaaatcagtggcaggcaagtgatattgactggagccagagcgcgccacttgctgaactggtcggcattcgcgtaccgccgcaaacagaacgtaagcacatcattatcgataacgatagcccggaggccattgccgagctggcggaacatctgaagaaagccctgaactgaagcctacggagaagaaacgatgagtcaattaaacagcgtctgggtctttagcgataatcctgaacgttatgctgaactgtttggcggcgctcagcaatggggccaacaggtgtatgccattgtacaaaataccgaccaggcgcaggcagttatgccttatggtccaaaatgtctttatgttcttgcgcaaaacgacgcgctgcaacgcactgaaaattacgccgaaagcattgctgccctgctgaaagataaacaccccgctatgttgctgttggccgcgacgaaacgtggtaaagcgctggcagcacggttaagtgtgcaactgaatgcggcgctggtgaacgatgccacggcggtggatattgtcgatggtcacatttgcgccgaacaccggatgtatggcgggttagcgttcgctcaggaaaagatcaacagcccgctggcgatcattacccttgcacccggtgttcaggaaccgtgcaccagtgatacctctcatcagtgcccgacagaaacggtaccttatgttgctccgcgtcatgaaattctctgtcgcgaacgccgtgcgaaagccgcaagcagcgtggacctgagcaaagcaaaacgtgtggttggcgtcggtcgtggactggcggcgcaggatgacctaaaaatggtccacgaactggcggcggtgctgaatgctgaagtcggctgtagtcgtccaattgccgaaggcgagaactggatggagcgtgaacgttatatcggtgtctccggcgtgttgctgaaatccgatctctacctgacgctggggatctccgggcagatccagcatatggttggcggcaacggcgcaaaagtgattgtcgccatcaataaagataaaaatgcgccaatcttcaactatgccgactacggtctggtgggcgatatctacaaagtcgtccctgccctgattagccagttgagccgctaattcccctttcaaccacatctcccgctgtaaacgcagcgggaagggagcataacgcatgagcgatgacaaatttgatgccattgtggtcggtgcgggcgttgctggtagcgttgccgcactggtcatggcacgagccgggctggatgtcctggtgatagaacgcggcgacagtgccggatgtaaaaacatgaccggcgggcgtctttatgcccacacacttgaagcaatcattccaggctttgcagtaagtgcgccggtagaacgcaaggtcacacgcgagaaaatctccttcttaaccgaagaaagcgccgttaccctcgattttcaccgcgagcagccagatgttccgcaacacgcatcttataccgtattgcgtaatcgtctggacccgtggttgatggaacaagccgagcaggcgggcgcgcagtttatcccaggcgttcgcgtcgacgcgctggttcgtgaaggaaacaaggtcactggcgtgcaggctggggatgatattctcgaagcgaatgtggtgattctggctgatggcgttaacagcatgcttggccgcagcctgggaatggttcccgcttccgatccgcatcattacgctgttggtgttaaagaggttattggcctcacaccagaacagatcaacgatcgctttaatattacgggcgaggaaggtgccgcctggctgtttgccggttccccttctgacggcctgatgggcgggggatttctctataccaacaaggattccatatccttggggctggtttgtggattgggtgatatcgcccatgcgcaaaaaagcgtgccgcaaatgctggaagattttaaacaacaccccgccattcgcccgctgattagcggcggcaaactgcttgaatattccgcgcatatggtgccggaaggcggtctggcaatggtgccgcaactggttaacgagggcgtgatgatcgttggtgacgccgcaggcttctgcctgaatttgggttttacggtccgcggcatggatttagccattgcaagcgctcaggctgccgccacaacggtgatcgccgccaaagaacgcgcggatttctccgccagcagtctggcgcaatacaaacgtgagctggaacaaagctgcgtcatgcgtgatatgcagcattttcgcaagatcccggcgctgatggaaaacccgcgcctgtttagccaatacccacgaatggtagccgacatcatgaacgagatgttcaccatcgacggcaaaccaaaccagccggtacgaaaaatgatcatgggacatgcgaagaaaattgggctgatcaacttgctgaaagatggcattaagggagcaaccgcgctatgagccagaacgctacggttaacgtcgacatcaaattaggcgtcaataaattccatgttgatgagggccacccgcatatcattctggcggaaaatcccgatatcaatgaattccataaattaatgaaagcctgccctgccggactttataagcaggatgacgcaggaaacattcattttgattccgccggttgtctggagtgcggcacctgtcgggtgctgtgcggtaacactattctcgaacagtggcaatatcccgcaggcaccttcggtattgattttcgctacggctaatcatgcatcccacaggcccgcatctcgggcctgatgttctgtttcgagagtccaacatgaaagtgacattaacgtttaacgaacaacgtcgtgcggcgtatcgtcagcaagggttatggggcgatgctagcctggccgattactggcagcagaccgctcgtgcgatgccagacaaaattgccgtggtcgataatcatggtgcaagctacacctatagcgcgctcgatcacgccgcgagctgtctggcaaactggatgttagcgaagggtattgaaagtggcgatcgcatcgcatttcaactgcctggctggtgtgaatttaccgttatctatcttgcctgcctgaaaatcggtgcagtttccgtgccgctgttgccttcctggcgggaagcagaactggtgtgggtgctcaataagtgtcaggcaaaaatgttctttgcaccgacgttgtttaaacaaacgcgtccggtagatttaatcctgccgctgcaaaatcagcttccacaactacaacaaattgtcggcgtggacaaactggctcccgccacctcttccctcagtttaagtcagattatcgccgacaataccagtctgaccacggcgataacgacccacggcgatgaattagctgcggtgctgtttacctccggaaccgagggtctgccaaagggcgtgatgctaacgcataacaatattctcgccagtgagcgggcttattgcgcgcgactgaatctgacctggcaggatgtctttatgatgcctgcgccacttggtcacgcaacgggctttctgcatggcgtaacggcaccattcttaattggcgctcgcagcgtgttgttagatattttcactcctgatgcgtgtctcgcgctgcttgagcagcagcgttgcacctgtatgctcggcgcaacgccgtttgtctatgatcttttgaatgtactagagaaacaacccgcggaccttagtgcgctgcgtttctttctttgcggcggaaccacaatccccaaaaaagtggcgcgtgaatgccagcagcgcggcattaaattattaagtgtttatggttccacagaaagtagcccgcatgcggtggtgaatctcgatgatcctttgagccgctttatgcacaccgatggttacgctgccgcaggtgtagagattaaagtggtcgatgacgcacgcaagaccttaccgccaggttgcgaaggtgaagaagccagccgtggccccaatgtgtttatggggtattttgatgaacctgaattaaccgcccgtgccctggatgaagaaggctggtattacagcggcgatctctgccgtatggatgaggctggctatataaaaattaccggacgcaaaaaagatattattgtccgcggcggcgaaaatattagcagccgtgaagtggaagatattttattgcagcatcctaaaattcacgatgcctgtgtggttgcaatgtccgatgaacgtttaggtgaacgaagttgcgcttatgtcgtgctgaaagcgccgcatcatagtttaagcctggaagaggtagtggctttttttagccgtaaacgggtcgcaaaatataaatatcctgaacatatcgtggtaatcgaaaaactaccgcgaactaccagtggtaaaatacaaaagtttttgttaagaaaagatattatgcggcgtttaacgcaggatgtctgtgaagagattgaataagtttcatcttcggggatcacataaccccggcgactaaacgccgccggggatttattttatttcttcagttcagccaggcttaaccaggtttgcaccacggtgtccgggttcagagacaggctatcgatcccctcttccatcaaccatgcggcaaagtcttcgtggtcggacggaccctgaccgcaaatcccgacatatttgccctgtttcttcgcggcacggatagccatgctcagcagtgctttcaccgcatcgttgcgctcatcgaacaattcagacaccacgccggagtcacggtccagaccgagcgccagctgcgtcatatcgttactgccaatactgaagccgtcgaaatattcgaggaactgctcggccagcaaggcgttggacgggatttcacacatcatgatgattttcagcccgttctcgccacgtttcagcccctgacgcgccagttcttcaaccaccgctttcgcctgatctacggtacgcacgaacgggatcatgatctcaacgttggtcagtcccatgtcgttgcgcacacgtttcactgcttcacactccagcgcgaaacagtcgcggaagctgtcggaaacatagcggcccgcgccacggaagccgagcatcgggttctcttcatctggctcgtaacgctcaccaccgaccaggttggcatattcgttgcttttaaaatcagagagacggacaatgacgcgcttcggataaaacgcggcacccagcgtcgcgatcccttcagtcagacgaccaacgtaaaattcacgcggagaatcaaaacctttcatcatctcgcggatttcgttttgcaactgcggttcctgatcgtcaaactcaagcagtgcgcgtgggtggacgccaatcatacggttgatgataaattccagacgcgcaaggcccacgccttcgttcggtaggcaggcgaagtcgaaagcacggtccgggttaccgacgttcatcatcactttcaacggcagatccggcatcgtttctacgctggagcttttcacgctaaattccagcaactccgcatagacgtaaccggtatcaccttcggcacaagaaacagtgacgttctcaccgtctttcatccgttctgttgcatctccacagcccactaccgccggaatgcccagttcacgagcgatgatcgccgcgtgacaggtacgaccgccacggttggtgacgatggcagatgctttcttcatgatcggttcccagtccgggtcggtcatgtcagtaaccagcacgtcgccaggttcgatgcggttcatttcgctgatgtcatggatgactttcaccggacccgcaccgatgcgatgaccgatagcacggccttcggcgataatcttaccctgactatgcagcgtataacgctccatgacctgaccgcgactgcgcacggtttccggacgcgcctgcacaatgaacagtttaccggtgtggccatctttcgcccactcaatatccatcgggcgaccgtagtgtttctcaatttgtacggcctgttttgccagttcctgcacttcttcgttggtcaggctgaagatgtcacgctgttcctgcggtacgtcttcgattttaacctgcttgccgtgctcctgggtcggcgcgtaaaccatgcggatttttttgctccccatggtgcggcgcacgatagccgggcgattcgccgccagtgtcggtttatgcacgtaaaactcatccgggttaaccgcaccctgcacgaccatctcaccaaggccccatgcggaagtgataaacaccacctggtcaaagccggattcggtatcaatggagaacatcacgccagaacttgcgaggtcagagcgcaccatccgttgaacaccggcggagagcgccacaccacggtgatcgtaaccctggtgcacacgataagagatggcgcgatcgttaaacagagaagcaaatacatgtttcactgccacgagaacggcgtcaaaaccctgaacgttgaggaaggtttcctgctgaccggcaaaagaagcgtccggcatatcttctgcggtggcggaggagcgcaccgcaaaagaggcgttttcgtcatcggcggaaagctgtgcataggcttcgcggatggcgttttccagctcaggctggaagggagtgtcgataatccactggcggatttgcgcgcccgctttcgcaagctgagtaacatcgtcaatatccgttttatccagcagttcataaatgcgctggtttacgccgctttggtccagaaactggttaaacgcgtcggcggttgtggcgaaaccattcggaacggaaacacccattccggaaagattagtaatcatttcacccagggaggcatttttgcccccaaccctgtctacatcattcatgccgagttggttataccaaagcaccagcggactgctgccattgttggacatcgaacaatccttttgtgataaatgaacggtttgagaaacacatttctgcgcatttatctttgcatatttaaccggatgaaaaaaacggtgaatcgttcaagcaaatatatttttttactttttaagactgatcccagcgttgcgcaaatctgctctcttcgacaatttccacataaaccatcggtataaacgaaaccataaaaatgaaatgctgttttcataaaaaataaaattgaaggttcattttataaaccagacataacgttctacgcttctgtgcgtttttaatttatgctttcatagaattatgtctgcatcacgggaagaacaaaatggataatgctgttgatcgccacgttttttatatttctgatggtacggcaataactgcggaggtattaggacacgcagtaatgagtcaatttcccgtcactatcagcagcatcacgctgccgtttgtcgaaaatgagagccgtgcacgggcagtgaaggatcagattgacgcaatttatcaccagacaggcgtgcgcccgctggtcttctactccatcgtgttgccggagattcgcgccatcatcttgcaaagtgaaggcttttgccaggatatcgttcaggcgctggttgccccgctacaacaagagatgaaactggatccaacgccgattgctcatcgtacccatggccttaaccctaataatctcaataaatatgatgcgcgcattgcggcgattgattacaccctcgcccacgatgacggcattagcttgcgcaatctggaccaggctcaggtgatcctgctcggtgtttctcgctgtggtaaaacccccaccagtctgtatctggcaatgcagtttggtatccgcgcggcaaactacccctttattgccgacgatatggataatctggtgctacccgcgagcctcaaaccgcttcagcataaattgttcggcctgactatcgacccggaacgtctggcggcgattcgcgaggaacgtcgggagaacagtcgctatgccagccttcgtcagtgcaggatggaagtcgcggaagtggaagccttgtaccgtaaaaatcagatcccgtggattaacagtaccaattatagcgtagaagagattgccaccaagatcctcgatatcatgggccttagtcgccgaatgtactaaagaactagtgcattagcttatttttttgttatcatgctaaccacccggcgaggtgtgacacacctcgcacttgaaatcagcagcgattggtttatcgtgatgcgcatcacttcccggcagtcctgccgtagaagcaacaaatttctgagacttgtaatgaacagaactgacgaactccgtactgcgcgtattgagagcctggtaacgcccgccgaactcgcgctacggtatcccgtaacgcctggcgtcgccacccatgtcaccgactcccgccgcagaattgaaaaaatactgaatggtgaagataagcgactgttggtcattattggcccctgcagcatccacgatctcaccgctgcaatggagtacgccacccgtctgcagagcctgcgcaaccagtaccagagtcggctggaaatcgtaatgcgcacctattttgaaaaaccacgaactgttgtcggctggaaaggactaatctccgatccagatttaaacggcagctatcgggtaaatcacggtctggagctggcgcgcaaattacttttacaggtaaatgagctgggcgtcccaaccgcgaccgagttcctcgatatggtgaccggtcagtttattgctgatttaatcagttggggcgcgattggcgcacgtactaccgaaagtcagatccaccgcgaaatggctagcgcactctcctgtccggtaggttttaaaaatggtaccgatggcaatacgcggattgctgtggatgctatccgcgcagcccgcgccagccatatgttcctcagcccagacaaaaatggtcagatgaccatctatcagaccagcggcaacccgtatggccacattattatgcgtggcggcaaaaaaccgaattatcatgccgatgatatcgccgcagcctgcgatacgctgcacgagtttgatttacctgaacatctggtggtggatttcagccacggtaactgccagaagcagcaccgtcgccagttagaagtttgtgaggatatttgtcagcaaatccgcaatggctctacggcgattgctggaattatggcggaaagtttcctgcgcgaaggaacgcaaaaaatcgtcggcagtcagccgctcacttacggtcaatccattaccgacccgtgtctgggctgggaggataccgaacgcctggtcgaaaaactcgcctctgcggtagatacccgcttctgaatgcgtgcccattcctgacggaatgggcatttctgcgcaacttgttgtcttctcaacaaattactgcttgctctggtcagccataatattgataataagaatcattgttatatcaattattattaatttttatgcgttatacggatagcagaaaactcacgcctgaaacggatgccaatcacaagaccgcttccccgcagcctattcggcgaatttccagccagacactgttaggtccggatggcaaactgattatcgatcatgacgggcaagaatatctgctccgtaaaactcaggctggcaagctgctgttgaccaagtaacctttaactgctgcagctgacttccagccgtttaccccagtcaggtggacgactgacatagtcatcatctctgtcgctgaaaggatttcgcaacgcctcatgcaggcggtgcaattccgtcatatcacccttttctgccgcttcaatcgcccgttgcgccaaccagttgcgcaataccagagcggggttaacgctttgcatcagttgctgacgctcactatcgctaacctcgtcttgttgcaaacgcccccgataacgggcaaaccagtcatcaaatgccgcacgatcaataaactcatcacgtagcggactcgccgcgctgtgctgctcggtcagactcagcatgcggaatgtgcgggtataatcgctgcgctctcgcgccatcagactgaataattcattcagtagcgcgttatcctctttttgctccgtcatgaagcccagtttctgccgcatccgttctccataatgcgtcaacaaaacctgctgatagctgtccagggcctcattcagggcatctacggcaacaaatgggctcaatgtctgcgccagacgctgtaaattccacaacgcgacggcaggttgattatcaaagctgtaacgcccttgatgatcgctgtgattacaaataaaaccgggttcgtaatcatcaagaaaaccaaacggcccgtaatcaagcgtcagccccagcaggctcatgttgtcggtattcatcaccccatgagcaaagccgaccgtctgccattgggcaattaagctcgcggtacgtgcgacaacatcgctaaaccagagacggtatttgtcctcatcatctgcaagatgactccagtaatgacgaatagcaaagtcagctaactgacgaaccttttcgctctcgcggcggtagtaaaaatgttcgaaatgaccaaagcgcagatgacttggtgccacacgcatcagcatcgcgcctggctccgccgtttcccgatacactgggctatcgctggtgacgatacttaacgcgcgggtcgtcggaatgcccagataatgcatcgcctcactggcgagactttctcgtatcgtgctacgtaaaaccgcccgtccatcacccattcggctataaggcgtcaggccagcacctttcagatgccagtccattgtagtgccatcagcaagcagttgttcgccgagtaaaatgccgcgcccatcacccagttggcccgcccagacgccgaactgatgaccactgtaaacctgcgccagtggactcataccaggcagtagggcttcgccgccccagacacctgcgccatttttaaacaggctgcttggaatactcagcgtgttagccagttcggtattatgccaaatcagccgggcattatttaaaggcgtaggggaaagtgctgtataggtttctggcaattcatcgcgccagcgggtaacaaaagacagggtcatagatcctcctgtttgatagtgtagacggttactctcgtcttaaacaccagcaaacagaagggttatcgctgaaccaacgtcgttatctgatttatgggaacggcaggccacaggcatccctggagagcatggaaatcgaagggggtaatctgtgccaatatttctgccgtatcaatgcctcccgcaatgatgcaattgcaacaaggggaaatttgcgcctggatcgcacgaataaacggttcgaaggagcggtgcgtgatttgttgctgaataaaacttttatccagcatgacgcgggtgaaaagaccatcaaaaaccgctttcattgtgctattgcctgctcccaaattacctaacacaaggggatacacttggcttaaggataaaagaccgcgattatcttttccttcattgagatgcgggtaattctcattaatcaacagttcaataaacggatattttaatagttcgcctgcgtaattatccctctctaataataatgtagccacttgtggcgttaaattaagccaggcaaagagtttatgttgaataaaaaaatgttggcaactttttagtaattccaactgctcactaaataattgccaatgttgctcctcggtaagttgcgctataacccgactcgtcgggatacgaaccgtaccatcttcactggagaaatgggtaattaactcaacgccgacaaggacttgctggttgtctcttatcggcaggaaatagcaatcagaatgataaagattctccaaaaaaatcttcatggtaaccgtccctctcgaaggatgtttttcagtatccggctaaaagggatgaggccataagacataacaattacagaaggagtaactttcatttgttccatgttaaccactttttcaggggtcctttttttagattatcctgattataaacgaataatccatttacggaatttttgtctgcaaaatactactgtattcaggagtaaatggacggcgatgtatcatcgccgtccatttttcgacatattagattcgtctcgcctgccagaaatttttctgccaatagacattatcaagactggaacgcatcactcccttgctggtagaggcgtggataaattggttgttggtatcgtaaatacctacatgcaaaccattttgtccggaccccgttttgaaaaagaccaggtcacctggcagcaactcgtctttatcaatttgcgtgccaatagaggcttgttgtttggtttcacggggcagctgcaaatcgaaacgatcgcgcatcgtcacaaccacaaatccgctacagtccacaccgcgccgcgtcatgccaccataacgatacggcgtgccatgccagctttgtagctggtcgttcaaaccggcaataacggtaatgctatcagaaagtctggcatttggcggcggtgctttatggtggctacacccggccagaagcagtgctgtgatcaaaataaggcagaaacgcattccgtacggttcctctgttttttattcttgcattaatttagcgtcgtaattacccgattttcaagatactaatgaaatcagatggtgctaatcagcattctgtgaccttcgatatccagacggcgaaaattcatcccataggcctgcgccagatttggcggcgtgagcacctcttccctgcgtccactggccagcatttttccaccttttagcaaccacgcccgatgcgcatgacgcaatgtgtggttgagatcgtgactgctcatcacaatcgccagtccttgctgacacagcgcgctcagaattttgtctaacgcactttgttgcgcaacatcaagactgttcatcggctcatcaagaagcagcaattggcctgcgggattggcttgtggtgtgatttgcaacaccaccgcagcaagacgtacgcgttgccattcaccgccggaaagttgattggtgctacgtccgagtttgtcatcaagagccagcgcccctgcgacatcattcagtagttcggtacgcgttttatcgtgctgatgcagtgtcaggtagtgccagaccggcgttgcaaacggcggcgtctgctgttgactaagataggcgcgatgcagcgcgagttttgttgcggaccatgcttccagtggttgccccgcgaactgaatgcttcccttaccgctggtcattccggccattcgcgccagtaaggtactcttacccgcgccattcggccccaccaggtgcaggatctccccagcccgaacctcgccagaaagcggccccaggcgggtagattccgcaacatcttgtaactgcatcacaatagacattattttgccaacgccagtttaatgctttccatcacaatgggatcttccggcgtcatatccggggaaaaacgctggatgacttttccgtccctgccaaccaggaatttttcaaaattccataaaatatcatccgggtacagcggtgcacggcctttgctgaccatacgggcatagaatccgctctcttccggcgcgactgcggtcggcgctgcggcaatcaatttttgatacagcggatggcgtccttcgccattaacttcaatcttactgaacatcgggaacgtcaccccccatgtggtggtacagtaagttttaatctcttcatcgctgcccggttcttgttccagaaactggttgcacgggaatcccagcaccataaaacctcgatcgacccaggctttctgaatattctccaactgctcatattgcggcgttaagccacacttactggcgacattgacaatcaacagcacattaccggcgaacttctccagcgtggtcacttcaccgtcgatatctttcactacggtcgtcagaatggaatcttgcatcgtttctcctgggtgtggtcagtaaaaatcttagcttttaatcatagaccgtctttttgcggttaacgtcctgcttttaacaataaccagataaacaccggcgcacctaacgttgcggtgaccacgccaataggcagctctgcggcagctaatgccaggcgcgctacaatatcggccagcagcaatgcgctcgcccctgccagcgcgcagccgggaagtaatacgcgatgatcggttaaaccacacaaccggagaatatgggggatcaccagaccaataaagccgatagcacccgccagcgccacactgacgccaaccatccagccggtcgctgccaccagcacattgcgccagaaccacaggggtaaacccagttgccgcgcgctgatctcgccaagtgctaacatattcatcggcctggactgacaacagatccacaacaacacggggatcaatgccagcatcagccagctttgccgccagtctacgccgccaaaaccgcccatcatccagtacatcagctgacgcaaatcaacactggtggaaaagtagatagcccacgtcattagtgcgctacagataatccctaatgcaacgccagccagcaataaccgactggtgctaagatgacgacgggcgaaacgtaagagtattaaagtgatgataagcgcgccagcaatcgcacacagccctagcgcccagttggggagttgcccttgcccaagcaataccgcggcgataagccccacgcctgcgccgttagagacgccaagtagtccaggttctgccagaggattttcaaacaacgcctgcattacagcgccggatatagccagcgccgcaccaaccagcaatacagccagcgtacgtggcaggcgaatttgccagacgaacagttcgccacgaggagtaaaccagtcacctgggctgatccattgttcaccggcgcaaaggcttaagagaagcgccagcagcatcaaaacactcaggcataataaccagcgaatattttgtcgctgttgttggcgggcaagtgtcagcatggtatccgttctgctgaagtgtcatggcgttgattttacggtgactcttcgacagtgaaaagaaaaaaggccgcagagcggcctttttagttagatcagattactcgtctttggggctagcgttttcgacccggctttttaacttctgcccgggtctgaaggtcaccacgcgccgtgctgtaatgggaatatcctcgcccgttttcgggttacgtcccgggcgttgattcttatcacgcagatcgaagttaccaaaaccagagagtttcacctgttcgccgttttccagagcgcgacggatctcttcgaaaaacagttcaaccagttctttggcatcccgcttgctaagcccaagcttatcaaacagatattcactcatttcagcttttgtaagcgccataggttcaatccctcaaacttgcctggaatcgctcttttaatgcctctacacatttggcgacggtagcggcaatctcctcttcttcgagtgtacggctggtatcttgcaggatcaggcttatggcgaggctcttatacccctccgcaacacccttaccgcggtacacgtcaaataagtttacgccaactacctgatttacgccaactttcttacattcggataaaatatccgctgcgggaacgttttctgcgaccaccaccgcgatgtcacgacggttcgccgggaagcgagaaatctcgcgcgcctgaggcaccacgcggtctgcgagcttgttccactccagttcgaacaccagagtgcgaccgttaagatccagtttacgttccagttcaggatgaacaaccccaacaaaaccaatacgttcacctttcagataaatcgctgcggattgccccggatgcagtgccggattcgcttctgcacggaactcaacctcattcagtttaccggtcaggtcgagaacggattcaagatcgcctttcaaatcatagaaatcaacggtctcttttgccaggttccagtgctcttcgtaacggttaccgcaaatcacaccggctaacatcagatcctgacgaatgcccaacggtgcctgagtatctggtacgaaacgcagaccgctttcgaaaatgcgcacacggttctgctgacggttctggttgtacaccacggttgccagcaggccagtccacagagaaagacgcattgcactcatttcaacagagatcgggcttggcagcagtaaggcttcaacgcctggatggatcatctgctgcactttcggatcaacgaagctgtaggtgatcacttcctgatagcctttgtcgttgagcagcgttttcacgcgcttgaggctcaggtcagcttcacggtgagtacccataatcaggcttgcctgtaccggctcatccgggatgttgttgtagccgtaaacacgcgcgacttcttcaaccagatcttcttcaatctccatatcgaaacgccagctcggcgcaactgcctgccattcgtctttgccttcggtcacttcgcagccgagacgacgcagaatgtcagttacctgctcatccgcaatatgatggccgatcaggcgatccagtttgctacgacgtagagtgatggttgcacgcttcggcagcgttgcttcgttggtgatatcaattaccgggccagcctcaccaccgcagatgtcgatcagcagacgggtcgcacgttccatcgctttgtgctgcagtgccggatcaacgccacgctcataacggtgagacgcatcggtatgcaggccatgacgacgagcacgaccggtgatagacagcgggctaaagaacgcgcattccagcagcacgttttgtgtttcgtcattcacgccagagtgttcgccaccgaagatgccgcccatcgccagcgccttgttgtggtcggcgatgaccagagtgtcagcattcagcttcgcttcagtaccgtcgagcagcaccagcgtttcgccctctttcgccatccgcaccacaatgccgccttcaatgcgatctttatcgaaagcgtgcatcggctggcccagttcgagcagcacatagttggtgacgtcaacaactgcatcgatagaacggatcccgcaacgacgcagtttttctttcatccacagcggagttggcgctttaacgttaatgccttttaccacacggccaagataacgcgggcaggcttccggcgcttcgactgtaatcggcagcgtgtcgtcgatggtcgcaccaaccggaacgatttccggttgaaccagcggcagctggttcagcacggcaacgtcacgcgcaacaccaatgatgcctaagcagtcggcacggtttggcgtcacgctgatttcgatggtgttgtcatcaagtttcaggtattcacggatatcggtgccaatcggcgcatccgcaggcagttcgataatgccgctgtgatcgtcagaaatgcccagttcagagaaggagcacagcatcccttcagacggttcgccacgcagtttcgccgctttaattttgaaatcacccggcagaacagcaccaatggtcgctaccgctacacgcaggccctgacggcagtttggcgcaccgcagacgatgtccagcaggcgatcgccgccgacattcacttttgtcacacgcagtttgtcagcgttcggatgctgcgcacactcaaccacttcaccaacgaccacgccgtggaagctgccggcaaccggttctacaccgtcaacttccaggcccgccatagtgatttgatttgccagcgcatcgctatcaatcgccgggttcacccattcgcgtaaccacagttcactgaatttcataatctattcctgccttatttaaactgtttgaggaaacgcagatcgttttcgaagaaactacgcaggtcggtgacgccgtaacgcaacatagtcagacgctccatccccatcccgaaggcgaaaccagagtaaacttccgggtcgatgccaacgttacgcaacacgttcggatgcaccatcccgcagcccagcacttccagccatttaccgtttttacccatgacgtccacttctgcagaaggttcggtaaacgggaagtaggaaggacggaagcgaatctgcaaatcttcctcaaagaagttacgcaggaagtcgtgcagcgtgcctttcaggttggtaaagctgatgttggtatcaacaatcagaccttccatctgatggaacatcggcgtgtgagtctggtcgtagtcgttacgataaacacggccaggcgcgatgatacgaatcggtggctgctgggctttcatggtgcggatctgtacgccagaggtctgggtacgcagcaggcgggtagtgtcaaaccagaaagtgtcgtggtcagcgcgcgccgggtggtgaccaggaatgttcagagcatcgaagttatgataatcgtcttcgatttccggcccggttgccacggtaaagccaagctcaccgaagaaactttcgatacggtcgatggtacgggtaaccggatgcagaccgccgttttcaatgcgacgacctggcagagagacatcaatcgtttccgccgccagacgcgcattcagtgcagcgctttccagttccgctttacgcgcattcagcgcctgctgaacctgctctttcgcttcgttgataaccgcaccagctgccggacgctcttctggcggcagctcacgcagggtcgtcatctgaagggttaagtgcccttttttacccaaatattcgacgcgcacattatctaacgcggcaacatcactcgcctggctaatggccgccttcgcactggcaaccagttctgcgagatgactcatggttttcctcattgtgtcagtggtgacactggttcgttggacttagagcctatcccatcaggctattttacttgccattttggtcccgggctgtgctcgaaattctcacgtacttaaatacgctccggtttctccgcgctggccgtgtccagtctggctgcgacaattacacctgatgagacaggctttttatttttcaaaacgcgcatacaaaaaaagcctccactgggaggctttcaggcgctgttttccgtttctcttctcacgcgctagcctcctggattcaggtgctaaagtaaaaaaagaagcggaaaatagcagcattcattgcttgcgttaccttttggtactcttcaaaagacctttattgaaaaggctacggcgataaaagtcaatgttttgatggcgttgaaacgaaaagagggagactagctccctctttcaactggcttatgccagagctgctttcgctttttcaaccagagcggtgaacgctactttgtcgaatactgcgatatcagccaggatcttacggtcgatttcaacagaggcttttttcaggccattgatgaatttgctgtaagaaataccgttctgacgtgctgctgcgttgatacgcgcaatccacagttgacggaactgacgcttacgttgacgacggtcacggtaagcatactgaccagctttgataacagcctggaaggcaacgcggtatacgcgagaacgcgcaccgtagtagcctttagcttgtttcaaaattttcttgtgacgtgcacgtgcaataacaccacgttttacgcgagccatatgtgctctcctgtatctatattctaattaaaaagttaaaaacgttaacggcttatgcgtacggcaggcacgcgattaccaggcccagatcgcctttggaaaccatggctttcggacgcaggtgacgtttacgtttggtcgcttttttggtcagaatgtgacgcaggttagcgtgcttgtgcttaaaaccacctttaccggtttttttgaagcgcttagcagcaccgcgtacggtcttaatttttggcattttaataacttccacttcgcattgttaataaacgaaacaaaggcgaacaaagcctgtgaagcccgaaggctccacagacagtgctacttgaaggccttactgtttcttcttaggagcgagcaccatgatcatctggcggccttcgatcttcgttgggaaggattcgaccactgccagttcttgcaaatcgtctttcacgcgattaagcacttccataccgatttgctggtgcgccatctcacgaccgcggaaacgcagcgtgattttggctttatcaccctcttcgagaaagcgaatcaggctgcggagttttacctgatagtcgccttcatctgtaccaggacggaatttaatttccttaacctggataactttttgctttttcttctgttccttagaagacttgctcttttcatagaggaatttgccgtaatccattatacgacaaaccggcggctcggcgttagggctgatctcgactaagtctactccggcttcttctgctttctccagagcttctctcagactcacaataccaagctgctcgccttccagacctgttaagcgaacttcctgggcgcgaatttcgccattgatacggttagggcgcgccgtttgaactcgttttccgcctttaataccttattcctccaattgtttaagactgcggctgcgaatctcttgttgcagcttctcgatcacttcatttacgtccatgcttcccaggtctttaccacggcgggtgcgaacggtaactttgccactttccacctctttatcaccacagaccagcatatatgggacgcgacgcaaagtgtgctcgcggattttaaagccaatcttctcatttctcaagtctgctttaacacgaatgcccgcattacttagtttttgcgtcaattcgttaacgtattcagactgactatcggtaatattcatgataacaacctgaaccggcgcaagccaggtcgggaagaaaccagcgaactcttcggtcaggataccgatgaaacgttccatgctccccagaattgcgcggtgaatcattaccggtactttacgttcattgtcttcgcctacataagaagcgctcagacgagacggcaaagagaagtccagctgtactgtaccgcactgccatgcacgatcgaggcagtcatacagggtaaattcaattttcggaccgtagaaagcgccttcacccagttgatattcaaacgggatgttgttttcttccagcgcaaccgccaggtccgcctcagcacgatcccacatttcgtcgctgccaatacgtttttcaggacgagtggagagtttgacgacgatcttctcgaagccaaaagtgctgtacatatcatagactaaacggatacatccgttaacttcatcgcgaatttgttcttcagtacagaagatatgcgcgtcatcctgggtaaatccacgcacgcgcatcaggccatgcaggctaccactcggctcgttacggtggcagctaccaaactcggccatacgcagcggcagatcgcgataagacttcagcccctggttgaaaatttgtacgtgacccgggcagttcatcggcttaatgcagtattcacggttctcagaagatgtggtgaacattgcatctttgtagttgtcccagtgaccggttttttcccacaggacacggtccatcatgaacggacctttaacttcctgatactggtactctttcagtttagaacgaacaaacacttccagttcacggaagatggtccagccgtcgttgtgccagaataccatacccggcgcttcttcctgcatatggtacaggtcgagctgtttaccgattttacggtggtcgcgtttcgcggcttcttccaggcgctgcaggtaagcgttaagtgcttttttgtctgcccacgccgtaccgtaaatacgttgcaacattttgttgttgctgtcgccacgccagtaagcccctgccgttttcattagtttgaaatgatggcagaaacgcatgttcggtacgtgcggaccgcggcacatatcgacatattcttcatggaagtacagacctggcttgtcatcatgggcgatgttttcgtcaagaatggagactttgtagctctccccacggttggcgaaagtttcacgcgcttcgtgccagctgactttcttcttaatgacgtcgtagtttttctcagcaagctcatgcatccgcttctcgagtgcttcgacatcttcctgggttaacgtgcggtcaagatcaacgtcgtaataaaaaccgttgtcaataaccgggccgattgccattttggtatgcggccaaagttgtttaatcgcgtgccctaacaggtgcgcacaggagtgacgaatgatctccagaccttcttcgtctttggcggtaatgatgctcagttgtgcgtcgttttcaatcagatcgcaagcatcaaccagttcgccattaacgcgccctgcgatacaggctttcgccagacctggaccaatgtccagcgcaacatccatggggcttacagcgtgatcgtaatggcgttggctgccatcaggaagagttataacaggcattttatatccttatttgcagtggtgacccacacgaaagatcacatacaaagaaaaatttgtttattaacagttcattgcgaaaccatctagccaacaaatgctaaattggttcgcaatcaggtacacaaatgaaagacattaacctctcaccttccacccggttgagcgatgttaacactaaaaaaagggagattgtacctttccgtttcacattgattcgattcgcaattcgtttgtagtgagtacaccagcaaaacgcttaaagaacaactgataacatcacggtgcgtctgaaaggtttactgcgagcggatttacagcagcataaactgaatccagcaaagttcgttgcgtgatttggcggtagtattttaaacgctcatgagattaatgacgaagtggtcatatcacaatgataaaagtgacacaattcttataacaatttttcgtgcacatttcgttctggcgataataattaatcatcatcctcaaaacctccagatatatataaggcgaacagattatgagtcaaaacgatatcattatcagaactcattataagtctcctcatagattgcacatcgatagcgacataccaacaccttcatcagagcctattaatcaatttgcgcgccagctcatcaccctacttgatacctctgacttaagttcgatgctgtcatactgtgttactcaggaatttaccgcaaactgtcgaaaaatatcacaaaattgttattccactgccctttttaccattaactttgccacttcacccatccatacagaaaatatactcattacattacactataaaaaagaaatcatttccttattactggaaaccacgcctattaaagctaaccatttgcgaagcatactggattatattgaacaggaacagttaactgctgaagatcgtaaccattgtatgaaactgtctaaaaaaatccatagagaaaaaaactatacacccaacagtaaatctcaatggtagtgcatgttttttgcaatctccttctgacgctattttttgtcgccatctgtcattgcaatacgcccttgattcattgagaaatggaaaaggcaaagtcaacctgattaaacattactcctccgttgaatccatacagcagcatgtccccttagtccgggacgcggagttcagagcattacttcgccatcctcctgcagggagtcgcgttatcgcgagtaaggattttggcttcgctttagatattttcttttgtcgaatgatggcaaacaatgtcagtcatatgtccgcgattttatatatagacaatcatactttgtcagtaaggctacgaataaagcagtcagtgtatggacaattaaattatgttgtgtccgtttacgacccgaacgataccaacgttgccgtcagagacacccacaggacagcacggggctttctttcgcttgataagttcatcagttcaggtcccgatgctcagacctgggctgatagatatgttcgcaactgtgcaattgctattctgcccctattacctgtgggagttccaggggctattttcgcgggtattgcatcacgaatgccatttgcccctatacatccatcggcaatgttgttaataatggctacaggccagtctcaacagcttattacattattcaaacagttgcccatactccctgaaaaagaaatcattgaaataataactgcgcagaatagcgttggtacacctgctttatttttggctatgatgaacggacatactgacaacgtgaaaatatttatgcaagaaattcagtcactggtagataatcacatcattcatgaagataatctggttaaattactgcaaactaaaagtgctaacgaaacacctggactttatatctccatgttgtatggattcgatgaaataatcgatatctttctgaatgcattaaccactccaatagcacaagagcttttaaacaaaaaactggtgatgagtattttagccatgaaaatacatgatggtgagccaggattatacgccgcaatggaaaataatcaccctttgtgtgtcacacggttcctctctaaaattaatggcatcgcctttaaatacaagttgagcaaagctaacatcatggatttattaaaaggagctacagcacagggaacccctgcattatacatcgccatgagcaagggtaatgaagacgtcgtgttatcttatatatcgacgctgggtgcttttgcaaaaaaacattcttttagtcaacatcagttatttacactattggccgctaaaaatcatgacaacatgtcagctgttcatatagccattcatcataagcattataaaactgtagaaacatattatgctgctattaatgcaatcagccaaagcctgagttttagtgctgatgaaataaagacgtatttataaccagctatttacgatatatatcgatacataattttatttttttcataaaacgcagaaacagtgaccatgtgcacaacgccacccgacggctgtaataacaaaaaatcccttgatgcctgtcccttttgttacactccgttatcacgcacaagagatatgcaggacactggtatgccgactaaacgctttgataaaaaacactggaagatggtggtggtgctactggcaatctgtggcgctatgttgttgctacgttgggcagcaatgatttggggctgagcagtgacaaacgaagacagccagaccgcataacacggtccggcagataattttacatgctgtagcccaggcttaaggttgtccgacggtcggtatgttccggtgcagactctggaggttcagagttccatgtgacgttgtaagccaccttcagtccaaaatgttcattaatagcaacatttaatgcgctttcggagttcagcgttgtgtcttccgcgccaaagacgctaacaccctgcgtaaatttagcgttgtcagtcaactgccatgcataagccccggaggcatagcccagcggctgggtttcactggcattgtcggtatatttgtcgtaacgcacacctggaccgaattcaaagcggaaactgtgtaccgggccattcaaaaactgacgaccataacccgcggtcaacacatcgcgctctcgatagccgttataacggtctgtcagccagcttgcctgaccaaataaatagtcataatcagttaaattaaaacggctacgcccgcccgccgcatatttttcactagaacgctcatcattagaagaagtattactggcgttcccccacaggctccaggcagtggtgtgtccataccaggtcatggtggtgtcagccgtaagactggagcttttcgtattgccactttgtgcaagatatcctgcgttcagattaccttcgaaaggttttttagcgctggcaggatcatccatgacagtaaaaacggaatcatcggcagctgcattcagactcgcaaacatgccccccgccaacataacgatggcaggaactgtcttcaaaagcttcatttatcaagagtccgtacaacaaaaaaagagaccatcgcggtcccggaaactttcttaaggatcaaagattagcgtccctggaaaggtaacgaattataaaaaggcgcgaataacttagcaatgtattcttatttcattttttgaataagcatgtggcgaaaacagatttttatttatatatatttatctgcaaaattttaaataaagctccaataaatcatattgttaatttcttcactttccgctgattcggtgccagactgaaatcagcctataggaggaaatgatggtacgtatctatacgttgacacttgcgccctctctcgatagcgcaacaattaccccgcaaatttatcccgaaggaaaactgcgctgtaccgcaccggtgttcgaacccgggggcggcggcatcaacgtcgcccgcgccattgcccatcttggaggcagtgccacagcgatcttcccggcgggtggcgcgaccggcgaacacctggttagtctgttggcggatgaaaatgtccccgtcgctactgtagaagccaaagactggacccggcagaatttacacgtacatgtggaagcaagcggtgagcagtatcgttttgttatgccaggcgcggcattaaatgaagatgagtttcgccagcttgaagagcaagttctggaaattgaatccggggccatcctggtcataagcggaagcctgccgccaggtgtgaagctggaaaaattaacccaactgatttccgctgcgcaaaaacaagggatccgctgcatcgtcgacagttctggcgaagcgttaagtgcagcactggcaattggtaacatcgagttggttaagcctaaccaaaaagaactcagtgcgctggtgaatcgcgaactcacccagccggacgatgtccgcaaagccgcgcaggaaatcgttaatagcggcaaggccaaacgggttgtcgtttccctgggtccacaaggagcgctgggtgttgatagtgaaaactgtattcaggtggtgccaccaccggtgaaaagccagagtaccgttggcgctggtgacagcatggtcggcgcgatgacactgaaactggcagaaaatgcctctcttgaagagatggttcgttttggcgtagctgcggggagtgcagccacactcaatcagggaacacgtctgtgctcccatgacgatacgcaaaaaatttacgcttacctttcccgctaacaaaaacattcccccagcattgggggaatcatcaccaacctgtcggcaacgcgtttctccgactatgctcaaaagtcatgtgataacaaaggggtgaactatggccagtggcgatcttgtccgttatgtcataaccgtcatgttgcatgaggatacattgactgaaattaacgagttgaataattacctgactcgcgacggttttttgctcactatgacggatgatgagggaaatatccatgagctgggaactaacacttttggacttatcagtacccaaagtgaagaagaaattagagaactggttagcgggcttacccaaagtgcaaccggcaaagatcctgaaatcaccatcacgacctgggaggaatggaatagcaacagaaaataaatggtttttgggcaataatcagtctgtggtgtgcgttagctcgtgtttttacaccgcattcttgcgctaaccttatgatctggcagacaacatgggagagacatcatgtggcaggcaatcagtcgtcttttgagcgagcagttaggtgaaggcgaaatcgaactgcgtaatgaactgcctggcggagaagtccatgccgcatggcatttgcgctatgcaggacatgattttttcgtcaaatgtgatgaaagggaactgcttcccggttttaccgccgaagccgaccaactggagttactgagccgtagtaaaaccgtcaccgtgcctaaggtttgggcagttggcgctgaccgtgactacagttttctggtgatggattatctcccacctcgtccgctggatgcgcatagcgcatttattcttggtcagcaaattgcgcgtttacatcaatggagcgaccaaccacaatttggccttgatttcgataacgcgctctccacaactccacagcccaacacctggcaacgtcgctggagtacgttttttgctgaacaacggattggctggcagttggaactggctgcagaaaaagggatcgctttcggcaatatcgacgccatcgtcgagcatattcagcagcgtctggccagtcatcaaccgcagccttctctgttgcacggcgatttatggtccggcaactgtgcactgggtccggatggcccgtacattttcgacccggcctgctactggggtgaccgagagtgcgacctggcgatgttaccgctgcatactgaacagccgccacaaatctatgacggctatcagagtgtatccccgctacctgccgatttccttgaacgtcaaccggtttaccaactctacacgctgttaaatcgtgcaaggttatttggcggtcagcatttggttattgctcagcagagtttggatagattattagcagcatgatatgggttgaggataatggccgctccgtgcggccttttgattaaataaacccaagcagagaaaagaacacataacctgcagcaatacaaataaccggcaggatatacagactgaaaaactgcaggaaaatagtatggtgcggaacaacaatacgggactcaatttgttcacgcgttagcccctcttcccctttggctttttccagaatgagttgatcttcaacaccttcccgcaagaagcgcgcctggcgactcatccgggcaccggaatcctgcaacgccagtccgacaaaaatcaggatgaaaatcacccagaacataacgttcacgccaccattaaaattgggcgtcggggagttataccagaatagattcaaaaaaggcgtattcgcctgcatcatatcgatcatgacatgagtaaagtcgagcatgaccgcattaatgccttccttgttttcctgccgggtattcataaatttcagcaaagaaatcaatgtagagatcaatgcaggtataaaaatcacccaacccaaaatccttttcaaaacagcaatgcgtccagcttgttgatacgtcatgagttctccttgattaagacgcgtcgtttcacttagtttacctgtagatatctgttttcgcccattctttaaaggcgatatgataggcgcttaatcataagcacggcttaataccttacacataatgctctaaaggagaggttgtaatgagtaccccgcgtcagattcttgctgcaatttttgatatggatggattacttatcgacagtgaacctttatgggatcgagccgaactggatgtgatggcaagcctgggggtggatatctcccgtcgtaacgagctgccggacaccttaggtttacgcatcgatatggtggtcgatctttggtacgcccggcaaccgtggaatgggccaagccgtcaggaagtagtagaacgggttattgcccgtgccattagtctggttgaagagacacgtccattattaccaggcgtgcgcgaagccgttgcgttatgcaaagaacaaggtttattggtgggactggcctccgcgagtccactacatatgctggaaaaagtgttgaccatgtttgacttacgcgacagtttcgatgccctcgccagcgccgaaaaactgccttacagcaagccgcatccgcaagtatatctcgactgcgcagcaaaactgggcgttgaccctctgacctgcgtagcgctggaagatagcgtaaatggcatgatcgcctctaaagcagcccgcatgcgttccatcgtcgttcctgcgccagaagcgcaaaatgatccacgttttgtattagcagacgtcaaacttagtagcctgacagaactcaccgcaaaagaccttctcggttaatgaccaggggcagtgatctcgctgcccctggttctttatctgaaattgcattcaactgacggattaatcgtcaatttaagagaaagagttacaccgtcaccacttccgtgcactgtataaaaatcctatactgtacgtatcgacagtttagtgagttttatcatgacggcggaaggtcaccttctcttttctattgcttgtgcggtatttgccaaaaatgccgagctgacgcccgtgctggcacagggtgactggtggcatattgtcccttccgcaatcctgacgtgtttgttaccggacatcgatcacccaaagagctttcttgggcagcgattaaaatggataagtaaaccgatcgcccgcgcttttgggcatcgtggttttacccacagtctgctggcggtatttgcgctgctggcaaccttttaccttaaggttccggaaggctggttcattccggctgatgcgctacaaggaatggtgctgggttatttgagccacatacttgccgatatgctgacacccgccggtgttcccctgctctggccatgccgctggcgtttccgcttgcctatcctggttccccaaaagggcaaccaactggaacgttttatctgcatggcattatttgtctggagcgtatggatgccccatagtttacccgagaacagcgctgttcgttggagtagccaaatgatcaataccttgcagatccagtttcatcggcttattaagcatcaggttgaatactaaaaaggcaaaaatcacctttctggaataagcaattccatttgaatataagagccagctcacagttctgttaatcttgcgccaacactatgactgctacgcagtgatagaaataataagatcaggagaacggggatgaactttccattaattgcgaacatcgtggtgttcgttgtactgctgtttgcgctggctcagacccgccataaacagtggagtctggcgaaaaaagtgctggtgggtctggtgatgggtgtggtttttggccttgccctgcataccatttatggttctgacagccaggtacttaaagattctgtacagtggtttaacatcgttggtaacggctatgttcaactgctgcaaatgatcgttatgccgttagtcttcgcctctattctgagcgcggttgcccgtctgcataacgcatctcagttaggcaaaatcagttttctgaccatcggtacgcttttgtttaccacgctgattgcggcgctggtcggtgtgctggtcaccaacctgtttggtttgacggctgaaggtctggttcagggtggtgcagaaactgcacgtctgaacgccattgaaagtaactatgttggtaaagtctctgatctgagcgttccgcagctggtcttgtcctttatcccgaaaaacccgtttgccgatcttaccggagccaatccgacgagtattatcagcgtggtaatttttgccgcattcctcggcgtagctgcattgaaactgctgaaggatgatgcgccgaaaggtgaacgcgtcttagccgctatcgataccctacaaagctgggtgatgaaactggttcgcctggtcatgcagttgaccccttacggcgttctggctctaatgaccaaagtggttgcaggttctaacttgcaagacatcatcaaactgggaagtttcgttgtcgcgtcctacctcggtctgctgattatgtttgcagtgcatggcattctgctgggcattaatggcgtgagtccgctgaagtacttccgtaaggtatggcctgtgctgacgtttgcctttaccagccgttccagtgctgcgtctatcccactgaatgtggaagcacaaacgcgtcgtctgggcgttcctgaatccatcgccagtttcgccgcctctttcggtgcaaccattggtcagaacggctgcgccggtttgtatccggcaatgctggcggtgatggttgcgcctacggttggcattaacccgctggacccgatgtggattgcgacgctggtcggtattgttaccgttagttccgcaggcgttgccggtgtcggtggtggtgcaactttcgccgcactgattgtactgcctgcgatgggcctgccagtaaccctggtggcgctgttaatctccgttgaaccgcttatcgacatgggccgtacggcgttaaacgttagtggcagcatgacagctggcacgctgaccagccagtggctgaagcaaaccgataaagccattctggatagcgaagacgacgccgaactggcacaccattaattcttatgctggcaacggtccgttttgtataggggccgttgccttactttttaaatgttccatcgcggcgatgcatacactctcatatttaaacagatcgtcagcgaaaaaaatgtccaacttatcaatacattcctggctcaaactatgtgcctgtaggctgaagcttaaaacctcatacccgagacgttttctaagactactatctggaatactcataatatcttcaagcacaccacttcccattcccggaagatttagtggattaaaaagaagattgatattaagcatacttattatgctaggaaactttaggagactctcatttttttgaatcgcagcaaaaatgctcccgacaggatgtatataattttgttcatagtatatagtccttaaatagtgaataaccaacctgttttttatactgatcaaattggtcattttttctgggcgaaatacagaagtgacatccattccaataaaatctttatttatacctcttatccgaatttcactaccataaagattattaattattactctatatttaacattgtcctgcagatatgtatcaaaactaagtgctggcgctcctggcttactggcatcatagttaatgttagacatataggcaatcatataattaaagttactttctgctatttcatcgcagtcacattgacccgtacttataaagaaagtgagtgctgtcatagtagactgcagcctttctttaaaagagtcgaaagccaggcttttaatatttaaatcaccataattactctgtattaagtttgtagaaaacatctcccgcctcatattgttaacaaaattattatctcatttaaatctaagtcatttacaatataagtttaagagcgacgccacaggatgaactatcaaaaatagctcatcatgattagcaaaacttaaccattttaaaataaataaacaattaaagaaaaaagatcacttatttatagcaatagatcgtcaaaggcagctttttgttacaggtggtttgaatgaatgtagcaacgaaatacagaatttcaggtcatgtaactcccggcaaaaccgggaggtatgtaatccttactcagtcacttccccttcctggcggatctgatttgcccaacgttgggcagattcaggcacagtaaacgccggactgcgcagaaaactctctcccatcagtacaaacgcaacatatttgccacgcagcatccagacatcacgaaagctatccatctttatcgcatgttctggcggcgcgggttccgtgcgtgggacatagctaataatctggcggttttgctggcggagcggtttcttcattactggcttcactaaacgcatattaaaaatcagaaaaactgtagtttagccgatttagcccctgtacgtcccgctttgcgtgtatttcataacaccgtttccagaatagtctccgaagcgggatctggctggtggtctatagttagagagttttttgaccaaaacagcggccctttcagtaataaattaaggagacgagttcaatgagccaacataacgaaaagaacccacatcagcaccagagtccactacacgattccagcgaagcgaaaccggggatggacagtctggcacctgaggacggctctcatcgtccagcggctgaaccaacaccgccaggtgcacaacctaccgccccagggagcctgaaagcccctgatacgcgtaacgaaaaacttaattctctggaagacgtacgcaaaggcagtgaaaattatgcgctgaccactaatcagggcgtgcgcatcgccgacgatcaaaacagtctgcgtgccggtagccgtggtccaacgctgctggaagattttattctgcgcgagaaaatcacccactttgaccatgagcgcattccggaacgtattgttcatgcacgcggaagtgccgctcacggttatttccagccatataaaagcttaagcgatattaccaaagcggatttcctcagtgatccgaacaaaatcaccccagtatttgtacgtttctctaccgttcagggtggtgctggctctgctgataccgtgcgtgatatccgtggctttgccaccaagttctataccgaagagggtatttttgacctcgttggcaataacacgccaatcttctttatccaggatgcgcataaattccccgattttgttcatgcggtaaaaccagaaccgcactgggcaattccacaagggcaaagtgcccacgatactttctgggattatgtttctctgcaacctgaaactctgcacaacgtgatgtgggcgatgagcgatcgcggcatcccccgcagttaccgcaccatggaaggcttcggtattcacaccttccgcctgattaatgccgaagggaaggcaacgtttgtacgtttccactggaaaccactggcaggtaaagccagtctcgtttgggatgaagcacaaaaactcaccggacgtgacccggacttccaccgccgcgagttgtgggaagccattgaagcaggcgattttccggaatacgaactgggcttccagttgattcctgaagaagatgaattcaagttcgacttcgatcttctcgatccaaccaaacttatcccggaagaactggtgcccgttcagcgtgtcggcaaaatggtgctcaatcgcaacccggataacttctttgctgaaaacgaacaggcggctttccatcctgggcatatcgtgccgggactggacttcaccaacgatccgctgttgcagggacgtttgttctcctataccgatacacaaatcagtcgtcttggtgggccgaatttccatgagattccgattaaccgtccgacctgcccttaccataatttccagcgtgacggcatgcatcgcatggggatcgacactaacccggcgaattacgaaccgaacagcattaacgataactggccgcgcgaaacaccgccggggccgaaacgcggcggttttgaaagttaccaggagcgcgtggaaggcaataaagttcgcgagcgcagcccaagctttggcgaatattattcccatccgcgtctgttctggctaagtcagacgccatttgagcagcgccatattgtcgatggtttcagttttgagttaagcaaagtcgttcgtccgtatattcgtgagcgcgttgttgaccagctggcgcatattgatctcactctggcccaggcggtggcgaaaaatctcggtatcgaactgactgacgaccagctgaatatcaccccacctccggacgtcaacggtctgaaaaaggatccatccttaagtttgtacgccattcctgacggtgatgtgaaaggtcgcgtggtagcgattttacttaatgatgaagtgagaagcgcagaccttctggccattctcaaggcgctgaaggccaaaggcgttcatgccaaactgctctactcccgaatgggtgaagtgactgcggatgacggtacggtgttgcctatagccgctacctttgccggtgcacctagcctgacggtcgatgcggtcattgtcccttgcggcaatatcgcggatatcgctgacaacggcgatgccaactactacctgatggaagcctacaaacaccttaaaccgattgcgctggcgggtgacgcgcgcaagtttaaagcaacaatcaagatcgctgaccagggtgaagaagggattgtggaagctgacagcgctgacggtagttttatggatgaactgctaacgctgatggcagcacaccgcgtgtggagtcgcattcctaagattgacaaaattcctgcctgatgggaggcggcgcaattgcgccgcctcaaatgatttacatagtgcgctttgtttatgccggatgcggcgtgaacgccttatccggcctacaaaactgtgcaaattcaatatattgcaggaaacacgtaggcctgataagcgaagcgcatcaggcagttttgcgtttgtcagcagtctcaagcggcgcagttacgccgcctttgtaggaattaatcgccggatgcaaggttcacgccgcatctggcaaacatcctcacttacacatcccgataactccccaaccgataaccacgctgagcgatagcacctttcaagctcgcacttgtcaacacatccagctccgttaagcgtgggaaacagtaagcactctgacggatagtattatcgataaacgccggatgacacatcacctccaggctacgatcaccccgatggcctgcgtcatccagcacttgcaggaacaggctctcactgatctcttcaccgtagaatgcactgctgaatccctgggtagtgcgcaggttgaccggcaaatcaaacgccatctgacgatccgcccgcaacgcaatgccctgctctgccgcaaacctggcaacaatcgggaaaatctgcgggaacatatgcacatgatgatggctatcaagatgcgtaggtttgcgtccaaatagctcaatgaaacgcaaatactgactgacaagctcctgagtaatttcttccagcggtaaagcatcttcttctgccaactgccagatccattttcccagcacaccatcgcgggttaaccccggcatagctgtcagtggcttacccatagtaaggacaaagtgcatccctatggccagactcggttcatcacgactcaactgcaccgcatggtcaatagcctgcccattcaccagcgccgtcgtgctcgtgacaatcccattgcgacaggcctcgataatgccgtagttctgacctttgcttaagccaaaatcatcggcattaacaatcagtaagcgttccataatcagcctcggttaatgtgcttttttaagctctgcgatgcagtcggcaaagtttggcagccatttctcgtgcgccagaatcatctcgcgtgccagcagctcagcatcgcgatcggaatgcaccaacggactaaggtttagcgccagtaacacatcgttaaattctccgctaagtgcggcgttactggcagcaatctcgaagcctttaatggtgtgaatcagccccattactttatcatcgaaatgcgtaatgcgcggatgtggcgtcgcgccatcgcgccccagcttacaggtcatttctactgcccagtctgccggaatattatcaatctgcccatgatgcgggatattaacgtaatgttctgcttgcttgtcgttgtagatagcgttgatcacttcgcatgctgcatcagagtaataagccccaccgcgctgttccagttctttcggcttaactttcagctcaggatttttatacagctcaaaaagttgtttctcgactttctgtactacctgcgctcgtgcgccgcctttgtagtattcgcccatttcaatagccagcatctctttctgcttgaagtaatacagcagataagaacatggcagcagattcaagctacgaattaagccctcactaaatggcagatcgaaaatattttttacagaggacgcttttaactgcccactcgccacaccatcaagcaattcggcaaagcggctcttgccatttatcagcacatccttaatgaacaccatatggttgaggccgaacaaatcgatagataaatcatcgctgtctttcagcatcagaacatcgcgaataaacatcttcatgccgatcggaatattacacacgccgataaagcgtttaaatccggtatgacgataaacggcttcagtgaccattcccgccgggttagtgaagttaatcacccatgcattcggacaaagttcttcgacatcttttacgatgtcaaaaatcaccggaatggtacgcagacctttaaacaaaccgcccgcgccgttggtttcctgaccaagataaccatgacttaatggaatacgttcatccagttcacgcgccggtaattggccaacgcgcagttgggtagtaacgaaatcagcatctttcaatgcttcgcggcgatccagcgttttataaagcttcatcgggacgccagcgttatcaatcatccgttggcagagatcgaaaataatatccagtttcggtttaccaccttcgacatccaccagccataattcgctgaccggcaattcgtgataacgcttaataaatccttccagtaactccggggtatagctgctcccgccaccaatagtgacgacttttaatttctggctcataatttctcccttcagtacagaatactgatatctggcatatctgcccccccggacataaataatccagcaacaggacagatatgtgaattgtcaggtataacgacttactgattaaattcagtcaatttcttacgatagctcttaggcgtaaaggacgttaatttcttaaacgttttaataaacaaactcgggctactataaccggcctcaaacgcaatatccgtcacactatagttggtcatttccagttgttttttggcaaaattaatacggatttcattaataatctgcattggcgttttgccataatatcgttgagtcgctcgcgtcaaatattcctgacttttggcactcaacgccaccatattctccagcgcgctttcactaaactgctctttatcatgcatcttttctaccgtacttttcagccactgcggtacatcatcaatcacctgttcttcgcggtaatgacgtaaacggttaatgacataaaaagtaaccatctcaacaaactcttccagccctgtttcgcggaaattcaaactagaaatcactgtttccacataggtgagaaaagcgttattggtccggtatacctggctagcgacaaagcaataaggcaacaatggcaggtaatgctgctcaaaaaagcgtttactgatcccaacgttcaatatgcgcgtggcaccaaactcataaaaactttgatggtggctacctaacggaataaaaacaaaatcgccccgttccagtaacacgcgcttaccgttaatctcctggaaataacgcccggttaataccagagtaaattcataatagtcgtgctgatgcagtccgctgatactctcagttttgttatagataaacacatggaagtttttgccattaaacaactgctgttctcgggcagtggcaatttccggcgcgttaatcactggctgcatcatcgactccttatgccttcagtttttcatgaagctcaattaattcagtaatcagttcacgcgcaagcatggacgtcattaaatgatcctgagcgtggaccagcaccagactcactttcatcttaccttcgcccgcatcgccttcaatcagtttcgtctgtaccagatgcgcttcattcaatgccatccgactctgatccatcatggcttttgctgcggcaaaatcgccctgcttcgcctgtttcagtgccgcatacgccaggctgcgcgcttgtccggagttgatgatcagccccatcaccacttcttccagctcttcagcttccgtttgcgtatcgggaatgttatcgagatccatcatacatcgttcctctcttttcttaccggcacgattacccgtaccggcatcgattaaaatttcagggcgttagcgatatcttcttcgctctcttctttatcaatcgcattttgtgctttgttagccaccacaacaaagggcagataaattaacgttgcgatgccaaggttgaagagtgcgaccagcaatgcggcgacgctaccgttggtgttaaagaaggctcccagaccggttggcatggtccacggtgcaatattggtcaccggaggaataatgcccatgtagtacgctgcgagggtgattgccgccagaatcggttgtaccagtacaaacgggataaacatcaccgggttcatgataattggcagaccaaacagaatcggttcgttaatctggaagatgccggacggcagcgccagttttgccacctgacgataatcagcacggcgagaggcgataaagatagccaggatcaggcctaaagtcgcaccactgcccccaaggaaaataaaggagtccagcatcggcttggcccagatatggaaggtcttaccggctgccagcgccgcttcgacggaaccatattgctgataggtcgcgatattttccagtgcccacggcgtcataatgccgttgtccagtgcggtcagcgccagcgcgccatgaataccgaagaaccagagcagtggaacaaagatcacataggcccagcccaccacgctacccaagcttgccagtggggtactgatggtatccataatgatctgatggaagttggtgccccaggtattcaacgcccaggcaataatccccatcacggaaagaataataaagccgggaattaatgcgctgaaggaacggcttacactagcaggtacgctgtcgggcagtttaatgacccaattgcggcggacaataaaggtaaacatttctgccaccaccaggccaataataatcccggagatgatattcgccccacctaaccagtttgcaccaaccgcataggcctcaccgacactatatggggtgacggtcataaatgctgcaacggataacaacccagccgccagcgcatcgactttacgctcttctgccagcgccatgccaataaagaacggtgccattaaagacattattcctaatgttccgttatatacgttgccgccaatacctttcagaccattaagtgtttcaatggtactggcgtcgaggcgaatacctaaggaataaaaaaagctcccctccccaaagcttagaaaaacgttgttaattaatacaaacatggcccccgcaagggttaacggcattaagcgaataaagccatttttgattgcattaacgtgtggctgctttcctattttaactgcaaaagggaggagtaccttttcaaggcttgcaataacattactcatagaaaaatacccttaaaaaccgcaatttaaatattgcggtattgatttatgaaataactctttgacgggaaaatttaaaataaattaatttgctgcggcttttttaatcgctgcaaccgcagccttaagcacgcctaaaccatcgactttgccataaagcaggctgtcaattacttcaaccggtttgttgggtaacaaacgctggatttcgggcaacatataagcaatctgcggccctaataacacgacatcggcattctgacctttttcaccagccagtgtttccggaaatgcttcaataatgaccggaacttcatatttttctgcctgtgcgcgcattttacttaccagtaaagaggtagacatgcccgcagaacaaaacagataaatgtgtttcttttccataaaactgccctcatcgacgattatctgtcagccagacactccgcaagccttaacctgcttccatgctctgggtaacttgcgaaaccaacatgactttttttgtggctgaaaggagtatacggtatagacctgagcaatagtatttctttgaccttataaattgtttctccttgacctgtggttatgaccctcttcacatttcgggcaaataattcgcgaagataattaagaactcaggccaaaaaaaaccggcgcaatggccggtttccgttgttactcaagctttcagacgaattgattacttcgcagcctgtggatcagtgtcgtattcagcacaggtctgataaccggagttgatgacatatccggtatcatctaacgcgacaaagtaggtttctgctttaccatcacgttgacccaggatgtaggtctggcaagtaccgcgagcatggatcatgctcacttcagagctaggtttacccgcaatttgtgcaacctgcgcccggctcatgccttttttgacgtctttcaccacaggctgtacaaactggtctttggtacgatcataagccgtacaacccgccagcatggttaataccgccgctgcactcagaattcctgccatattcttgttcatattccgtcctcttgtttatcagcgtgttagataagcctggaatacattgggcgctttttcaagcccgtgaacgaaacggctccgctttcagaggattcctgtatgacgttttaaccaccattcagcccgctgtcgcttgtcgtttcagtagcaacgggttagctttaaggaagttttgtcttttctgtctggaggggttcaatgacattgcaacaacaaataataaaggcgctgggcgcaaaaccgcagattaatgctgaagaggaaattcgtcgtagtgtcgattttctgaaaagctacctgcaaacttatccgttcattaaaagtctggtgctcgggatcagcggcggtcaggactccacgcttgccggaaagctgtgccagatggcgattaatgagctgcgcctggaaaccggcaacgaaagtctgcaatttattgccgtacgcctgccctatggtgttcaggccgacgaacaagattgccaggatgccattgcctttattcaaccggatcgcgtattaaccgttaatatcaagggcgcggtattggccagcgaacaggcattgcgggaagcaggcattgaactgagcgattttgtccgtggcaatgaaaaagcgcgtgagcggatgaaagcacaatatagcattgcgggtatgaccagcggtgtcgtggtgggcaccgatcatgcagcagaagccattaccggattcttcactaaatatggtgacggcggtacggacattaatccgctgtatcgtctcaacaaacgtcagggtaaacagttactggcggcattagcttgcccggaacacctttataagaaagcgccaacggccgatctggaagatgatcgcccttctctgccagatgaagtggcactcggcgtgacctatgacaatatcgacgactatctggaagggaaaaacgtacctcaacaggtcgccagaacaatagagaactggtatctgaaaaccgaacataaacgccgtccgccaattaccgttttcgatgatttctggaaaaagtaataatttgcacatattggattgtgcgaaaaagagtaatttgttcacgccggatgcggcgtgaacgccttattcgacctataaaactatgcaaattcaatacattgcaggagtcgaataggcctgacaggcgtagcacgtcagacggtgtaacctttgtcatcgacccgcctcttttttaatcgcttcccgcctgttacactggatagataaccagcattcggagtcaacagtggtacggcgtttaacttctccgcggctcgaatttgaagctgcggcaatttatgaatatcccgaacatttacgtagtttccttaatgacttacccacccgaccaggggtgtatctgtttcatggtgaaagtgacaccatgccgctctatatcggcaaaagcgttaacatccgcagccgcgtcctttctcatttacgtaccccggatgaagccgccatgctacggcaatcccgacggatcagctggatatgtaccgccggtgaaatcggcgctctgctccttgaagcgcgattaatcaaagaacaacagccgctgtttaataaacggttgcgccgcaatcgccagctctgtgccctgcaattaaatgaaaagcgcgtcgatgtggtgtatgccaaagaggtggattttagtcgagcccccaacctgtttggcctgtttgccaataggcgcgcagctttgcaagcattgcagaccatcgctgatgaacaaaaactttgttatggcctgctgggactggaaccgttaagtcgcggtcgtgcatgttttcgtagtgcgctaaaacgttgcgccggagcatgctgcggtaaagagagccatgaggaacatgcgctacgcttgcgccagtctctggagcgtttgcgggtggtgtgttggccttggcaaggggcggtggcgctgaaagaacagcacccggaaatgactcaatatcatattattcaaaactggctgtggctgggggcggttaatagcctggaagaagcgacaacgttaattcggacacccgccgggtttgatcacgacggttataaaattctttgtaagccgctgctttccggtaactatgaaattactgaacttgatccggcgaatgaccagcgagccagttgattactgaacttgatccgggctatgaccagcgagccagttgatttcactgaacaacagtttaccttgcggttgtaaaagccgcagggtgtgcctgccatcgaaccagcacgcgccctggtcggtagtgagcaatttatcgcccagttgccacgccccgttaatcacaaacaccaccccgccgcgactgccaaaggtagtaaacgtacgttcggcaattctgactttcgccttacagacatccaggcgtgtcatgatgttgaaatccatgctcatctgccctgccgtcagtttcgcttttaccacctggtccgctgcaaaggcaaaaggctggaacggttttaaggtatggttaaagcggtctgcgctttcaaggagcatctcgccgccttccagcaacgtcactatcctttccatgccgggaaacaaagaaaactccccattcgccgcgatggatgcaatgctggcacgccagtaaaaatcacgttttgccggtgggaacgtgcaaatttcgcgcgtttcaccggcagcatttcgccacagattcacgctcattttacgcatatcaaagtattccatactcgctcccggcccgttcttttcattgttatcgttcaggtaaccgtggatggttatcggcaactcgggtgatttacgttagtggtgatcaggctttttttacaactgtttgagaagagaaaagaaaaccgccgatcctgtccaccgcattactgcaaggtagtggacaagaccggcggtcttaagttttttggctgaaagattattcagcagttgcaggcattttaccttttgccgctggacgttctgtcagacgcttctcaaaattagcattaaattgctttttctgttccggcgtcaggatgttgtaaattttgttctgggtttccatgtgcgccagcatgttagctttgcgctgttcttccatttttgcgatctgcgcttcagcttttactttatcgaaggtatcgctggcaatgatgtcatgcattgcgcggcgttcttccagcggcggacgtttcatctggtcacgctggcctttcatgatttcgcggatctgctgtttctgcgcgtcggtcaggttcaggtctttgaacatcatgtcctgatgcggaccgaacttgcctttgtggtgcatcatcggcttcgcgtcagccggtgctgcggtagtggtgtctgcggcatgggccaggttagccgcgccaagagccagggtagaggcaacaaacagtgcagttaatttacgcatattctatatccttcctttcagttatttattacggctttcttaagtagcgtgccgtgttgacgagattaactttactgactttagcgtcaattaatcagagcaacggtaaaacaatgaaagtgtaaaaaacacttttgcgccaattatggagaaaaaaagaaaatttgatggagagtgatgagagaatattacaacacgatgattttgcagagattatgaagaactataccggatgactggtgataaataaagcaaataaccaggattaatctgtattaatttataagaaagcaacttaatacccgcagaatgatttctgcgggtaagtattagcttattttttcgagcattaatcccgcgcgtaatcccaacgctaccaacggattagggaataacacatactctacatcatgggttacggtaaaacgttcctctccgtcctgcgccagcaatgttcctttctcaaacggcataaaattcagcgtgtcacttgccatatgcatttcgaaggacgggctgtggcgagtaatttggctaaccacccgataacggagcggcggtgttctcacgataccgacactctcaccagatagcagcgcagcaattgcgctggcagttactgcaaactggcgaagatcgttttgcccaaagggcaacgctttgccaagttccagcgtacaggccagcgcgccaaaatgtctggcgctgaaatgggtaaacgtaccaccaggttcctgatggaacaccagcgcctccagccccgccgcacccagccacgtcagaaatttctcgtcccagggaatgtcgcgttgcggtaatacaccgaactgcggatgcaaggagccacgaattgcggtatgtagatcaaggtgccagcgcacagattctttgccctggtcataaaaatcttccaggcactgttccagttcgcgcgcccgacaggtttctccgctttcagcaaatagctgccaacgaccgccaaacattcgattcatatcgctatggcaataacgtttcccttgcttcagcgcaggaggattcccgaggatcaccagcaaccgccaacgtaacgggatctcgccgtgagatatcgcgccaagcaacgcgtccagcatctccacaggtgccgtctcattaccgtgtattcccgcactaatcaccagtgcgccttgcggtggcgttaatggcgtcagttccagcacaccatcgcccagccagcgccagcgaacgccgttgatttctcgctcggtgataaccggttttttacccgttaaggtcagagcaagaaaattatccattgccccctccctcgcgctggaacggataaacgctaccgagattcagtaattggctcaatacatccagtgcttcccgcccttcgcgcagcaattgcgggtcggccagatcggcagcagtaaggcgatcgcggtagtaacgatccacccagtcattgagcgcattaaacagcgtatcgttcatcatcaccgccggattcaccgcccggcgttcttcttctgtcaataccacccgcaaccgcaggcacgccgggccgccgccattcgccatgctttcacgtaaatcaaagacttttagttcgctaatcgggttgtcagcggcaaggagttcattgagataaccccatactccggcgtgttcccgacactcctgaggcagcaccaacatcatggaaccatcatcgcggctcagcagttggctgttaaacagataggtagacaccgtatcagacacggaaacctgagttgccggaacttctatcgccataaaaccattgacccgcgcacgcaggtttgccagtaactgactctggcgagcgaacgcctgttggtggcaaaacagcacctggcggttactcacggcaatcacgtcattatgaaaaacgccctggtcgataacgtccgggttttgctgggcgaaaatcacctgttggggattcacctgattcagccttgccaccgcctcgctggcttcgcgagtctgtcgcgccggataacgggaaggccgggtatcattgccttcttctcgcccgtagacaaaaagttgcatacccggttcaccgtaatgaccgccgagacgattgtggtttgccgccccctcatcaccgagcaacgctacctgtggcaacgcgctatggacgctaaatttctcttcgtcgttaaaaatcgcttttaacaggctttcagtgacgggcgcttccaggctacggtgaaatttattgttcaggttggcaacggtgagatgcactttgccatccagcgtatcggcagatggcgcgatcgttgccgcattggctacccacattgggctagcggaactgacgctggaaagccagtgcggtgcctggcgtgcaactttttccagtacctgctcatcgctaccactgaatcccaactgacgcagcaccggaataaacggacgctcgtgcggcgggatcacggcctgggggaatcccgcatcggcaagggctttcattttcagtaagccctgcttcgccgccagtcgcgggttagacacctgaaaacggtgacgggtagaggcttcattaccaaagctcaggcccgcgtaatgatgcgtcagccctaccagcccgtcgaaattgacttcccaggcgttcatcgcaccacctcatcggaaaaatccagcccggggttaagcgtggcgggcaatgttaagctgtcgctctccaggctcgccatcggccatgcgcagtaatctgcggcataccaggcgctggggcgatggttaccggaagcaccaatgccgccgaatggcgcggtactggcagcaccggtaagcggtttgttccagttaacaatccccgcccgcgcctccagcaacagttgatcgaacttttcccgctcgggggaaaccagaccgcaagagagtccgaagcgagtgttattcgccattcgaatcgcttcatcgaaagtatcataacgccagacgcgcaataacggtccgaacacctcttcatctggtacgccagcaacgcctgtcatttcaatgatccccggcgtcagcaagcttgtccctgcttgtaataagcgcggcgcaagcaggggtcgtccgcccatcgcttccagttgctgccatgcagtaaccacctgctgtgcggcctgttcagaaatcagcccgccaataaacggctgcggttcgtcatcccagttgcccggcgttaatcgctggctgacggcaaccagacgagcaagaaacgcatcgccctgcgccccgcttttcagcaataaacggcgggcgcaggtgcagcgttgaccggctgtgacaaacgcgctctgaatggtcagatggacagccgcgtcgatatccgccacctcatcgataattagcggattattaccgcccatctcaagggcgagaattttctccggctgaccggagagctggcgatgcaactggtagcctgtattggcgctaccggtaaacagcaaaccgtcgagatcctccagcgcactcagcgcctgacccgtttcacgcccgccctgcaccaggttcagcacgcctggcggcaagccagcctgctgccataaacgcattaccgcttcgccactccacggtgtcagttcgctgggtttaaagataatggtgttacctgccagcaatgccggaacgatatgtccgttcggcaaatgaccagggaaattatacggcccaaacaccgccagcacgccgtgcgggcgatgtcgcaggctcgccgcgccgtccggcatttcactacgctgctcgccggtacgaacgtgatacgccttaatacttatcgcgattttattgatcatcgccgtcacttcggttgccgcttcccagcgcggcttacccgtttctctggcaataatcgcggttaattcggctttattgctttccagcagtgcggcaaagcgttcgacaacggcatgacgttcagcaaaactaagccgcgcccagcgcggaaacgccgcacgggctgcccgacaagcctgctcgacctgagcggcatcggcatcattgccttgccataacacctcgccgcttaccggattacgcttcacacggcttgcgccctggcccgttatccagtcaccgttaatccataaagtcatgctgttttctcctctgcgcacaggcgcaccagacgaacgcgatccccggcgtggcatttgagggcatccagttgtgcggcggttaaaatcaaacgctcggttgccggatcggtacgcaccagcaccacgcggaaatggtgataattttcattggcgaccaggcaggctgggaaatcgccctgcgcaggctgcccttctgccacttccaccagccgacttttacggatggcgcgcacgcggtcgatgtcacactcaagcgtcggcccaccgtcaaagatgtcgatatagttacggtagcgaaaaccttctttctccagcaccgcgcgggcaggcgcggtttgcggatgtacctgaccgatgacgtcctgggcttcctgggataaaaagtgggtatagatcggatgtttcggcatcagttctgcaataaatgccttttgcccggtgccgcagagaaaatcggcgcggctaaaatccatgctaaagaagcgtttaccgaggctttgccagaacggactatagccgtgttcgtcaatcaccccgcgcatttcagcaaccactttgtcattaaacttgtcgcgaaaagccgccataaacataaagcggcttttgctcagcaaatagccgttgccctctttgcgccagtccgggtcgagaaacagcgtgcacagctcgctgctgccggtgtgatcgttactgagaaacagcgtcggcaatgcgttatagacattcagctctttactggcgtgaaccaacgtgccgacgcgatagttgtaccagggatcgttcagcccaaccgccacctcaatggcacaaatccccgccacggtgcctgtctcgctatcttccagcacgaacacatagccctgctcacttttgggcagttcgccttgccaggttttgattgccctttcgatacgcgcgctaagcgtggcttcattggcgggaaggctcgtcaggccgccgcccgttttgctggcaagctgcatcagcgcgctgacatcacttcgctcaacgggacggatgaccatcatgatgaacctcggctaacaaattatttcaactactacctcggctaacaaagtgttcgcaagcagctgcaaagcgatccagtccggtcgtcacctcttcttcgctgacattgagcgcaggcgcaaaacgcaccacgttgccacccgcaatcagtaccatcacgcctgctttcgccgcttcctgagagatctgtttcgcttgcccggcgtaatcggcattcagtacacagccaatcagcaaacctaagccgcgaacttcactgaacaaaccatagcggtgattaatagtattaagacgctcaacaaaccagtcgtgacgctgtttaacgccattaagcatctctggtgtgttgatgagctccagcactttgcctgccaccgcgctggccagcggattaccgccataggtggtgccatgagtgccaacggtcatcacgcgggcgcactcttcggttgccaacaacgcaccgaccgggaaaccgccgcccagcgctttggcggtagttaacagatcaggcgtcacgccgtagtgcatataggcatacagttccccggtgcgcccgacgccggtttgtacttcatcaaaaatcaacagcgcattgtggcggttacacaattcacgcagaccttgtaaaaacgcgttgctggctggcaccacaccgccttccccctggatgggttcgacaatcaccgcacaggtagagtcgtcaatcagcgcgctggcagagttaatatcgttatatgcagcatgacgaatatccgccggcagtggcgcaaaatcctgactataggctggctgcccacccgcactgacagtaaacagcgtgcgaccatgaaacgcatttttgaacgccacgatgccgctcttatggctgccgtagcggtcgtgagcgaatttacgcgccagttttagcgccgcttcgttggcttccgcaccggagttacaaaagaagacgcgatcggcaaacgtggcgtcgatcaattttttcgccagtcgcagtaccggctcgttggtgtaaccgttgccggtatgccagaacttactcgcctgttcgttcagcgcttcacgcagttccggatgcgcatggcccagcgcgttcaccgcaatgccacccgcgaagtcgatatactctttcccctgctgatcccacaagcggctaccttcgccacgtaccggtataaagggtgccggagcgtaaacaggtatcatccattcatcaaagttttcacgcgtaattggctgagacatagcgacctctacagtaaataattcgttatttatatgttaataataagtaatgtttgcgctgtaaatgtagattgcagggttcgtgccagccagtgataaaagtgcataaacggcggaggctaactggaaatcaaggagttataaccaaaccatatgcatttaaagtgcatataaagtgaatacgtttgcgatgtgggtgaataaaaagaataaaaaacgcaatgttatgcagaagtaaaatataattctggaattgtgatcattgacgaaatttactggaaattactgcgccattctgacgcagcgcgcaccaaaagcgggcatttttttgcgccatcgttgacatcattaacaaccatcgatcaaatcacttaacaacaggcggtaagcaacgcgaaattctgctaccatccacgcactctttatctgaataaatggcagcgactatgaaatttgtctcttttaatatcaacggcctgcgcgccagacctcaccagcttgaagccatcgtcgaaaagcaccaaccggatgtgattggcctgcaggagacaaaagttcatgacgatatgtttccgctcgaagaggtggcgaagctcggctacaacgtgttttatcacgggcagaaaggccattatggcgtggcgctgctgaccaaagagacgccgattgccgtgcgtcgcggctttcccggtgacgacgaagaggcgcagcggcggattattatggcggaaatccccagtctgctgggtaatgtcaccgtgatcaacggttacttcccgcagggtgaaagccgcgaccatccgataaaattcccggcaaaagcgcagttttatcagaatctgcaaaactacctggaaaccgaactcaaacgtgataatccggtactgattatgggcgatatgaatatcagccctacagatctggatatcggcattggcgaagaaaaccgtaagcgctggctgcgtaccggtaaatgctctttcctgccggaagagcgcgaatggatggacaggctgatgagctgggggttggtcgataccttccgccatgcgaatccgcaaacagcagatcgtttcagttggtttgattaccgcagtaaaggttttgacgataaccgtggtctgcgcatcgacctgctgctcgccagccaaccgctggcagaatgttgcgtagaaaccggcatcgactatgaaatccgcagcatggaaaaaccgtccgatcacgcccccgtctgggcgaccttccgccgctaatttagcagctctcctggctcaaactgggtcaggagaattaaccttgagaaaaatcaacaaactgtcagtaatgatttgttgcctgccgtcctttgttataccgtctctgcgtttttagttgtctgaccacttctctattatcaagtttgatataggaaactccacgatgaacgctgagcgtaaatttctttttgcctgtcttatttttgcgctggtcatttacgctatccacgctttcggtttattcgatctgctcaccgatttaccccacttacagacactcatccgccagagcggatttttcggctatagcctctatattctgttattcatcattgccaccctcttgctgttaccaggaagcatactggtgatcgcgggaggaatagtttttggcccgctcttagggacactactcagtttaattgccgccacgctggcctccagctgcagtttcctgctggcgcgctggctgggacgtgatttactgctgaaatacgttggccatagcaataccttccaggccattgaaaaaggcattgcgcgtaacggtattgattttcttattctgacccgcttaatcccgttgtttccttacaatattcaaaattacgcttacggattaaccacaatcgccttctggccttatacccttattagcgcactcacgaccctacccggtattgttatttataccgtgatggcaagcgatctcgccaatgaaggcattacgctgcgctttattttacaactctgtctggcgggcctggcgctgtttattctcgtccagctcgcaaaactctacgcccgacacaaacatgtggatctgtctgctagccgccgcagcccacttactcacccaaaaaatgaaggataaaacgatgttgcaacattatagtgtgagttggaaaaaaggactggctgcactctgtttactggctgttgctgggcttagcggctgcgatcaacaagagaatgcggcggcaaaagtggaatacgacggacttagcaacagccaaccgctgcgtgtcgatgccaataaccatacggtaaccatgctggtgcaaattaatggtcgtttcctcaccgacgacactcgtcacggtattgtgtttaaagatggctccaacggacataaaagcctgtttatgggttatgcgaccccgaaagcattttatgaagccctgaaagaggcaggtggtacgccgggcgaaaacatgacgatggataataaagaaacgactcatgtcacaggcagcaaactggatattagcgtcaactggcaaggggcggcaaaagcgtattccttcgatgaagtgattgttgacagtaatggcaagaaactggacatgcgctttggcggtaatttaacggcagcagaagagaagaaaacgggttgcctggtgtgtctggatagctgcccggtcggcatcgtcagcaatgcaacatacacttatggtgcggttgaaaaacgtggtgaagttaaattcaaaggcaatgccagtgttctcccggcggataacacgctggcaacggttacctttaaaatcgccgaataaagccaggataaaggatgatgatgatgcaaagccgaaaaatctggtactaccgtataaccctcatcatcctgttgttcgctatgctgctggcatgggcgctgcttcccggcgtccatgagtttatcaatcgcagcgttgcggcgtttgccgccgtggaccaacagggtatagaacgctttattcagtcttacggcgcactggcggcagttgtcagcttcttgttgatgattttgcaggccattgctgcaccgctacctgcgtttttgatcacctttgccaatgcgagcctgtttggcgcgttctggggcggcttgctgagctggaccagtagcatggccggcgcggcgctgtgcttttttatcgccagagtgatgggccgcgaagtggtggaaaaattaaccggcaaaaccgtgcttgacagtatggacggctttttcactcgctacggcaaacacaccattctggtctgtcggttattgccttttgtccctttcgatccaatcagctatgctgccggtttgactagtatacgttttcgcagcttttttatcgccaccgggcttggtcagttaccggcaactattgtttattcctgggcgggcagcatgttaacaggcggtactttctggtttgtcaccggactgtttattctgtttgccctgaccgtggtgatttttatggcgaagaaaatatggcttgaacgccagaagaggaatgcctgatgggtttaccgccgcttagcaaaattcctttaattttacgtccacaggcgtggctgcatcgtcgccattacggcgaggtgctaagccccattcgctggtgggggcggatcccgtttatcttttatctggtgagcatgtttgttggctggctggagcgcaaacgcagtccgctcgatccggtagtacgaagccttgtcagcgcgcgcattgcgcaaatgtgcctgtgtgagttttgtgtggatatcaccagtatgaaagtcgccgagcgcaccggcagcagcgataaactgctggcagtggctgactggcggcaaagcccgctctttagcgatgaagaacggctggcgctggagtacgccgaagccgcaagcgtaacgccgccaacggtcgatgatgccctgcgtacccgactggctgcgcattttgacgctcaggcgctcaccgaactgacggcattgatcggcctgcaaaatctgagtgcccgttttaattctgccatggacattcccgctcaggggctgtgccgtattcctgaaaaacgttcttaaggagagatgatgcgccattgtgggtggttgctgggattgttaagcctgttttctctggcaacacatgccagtgactggcaagaaattaaaaatgaggccaaagggcaaaccgtctggtttaacgcctggggcggcgataccgcaattaaccgctatctcgactgggtgagcggcgagatgaaaacccattacgctataaacctgaagattgtccgtctggcggatgccgcagacgcggtgaagcgcattcagaccgaagccgcagccggacgtaaaacgggcggcagcgtggatctgctctgggtgaacggcgaaaacttccgcaccttaaaagaggccaatttattacaaacgggctgggcggagactctgcccaactggcgctatgtcgacacacagctgccggtgcgggaagatttttctgtgccgacacaaggtgcggaaagcccctggggcggcgcacaactgacgtttatcgcccgccgcgatgttacgccacagccaccacaaacgccgcaagccttactggagtttgctaaagccaatcccggcacggttacctatccgcgcccaccggactttaccggcacggcgtttcttgaacagttgctgattatgctgacgcccgatcccgccgcattaaaagaagcgccggacgatgcgactttcgcccgtgtcactgctcccttgtggcaatatcttgatgtgctgcatccgtatttgtggcgcgaaggaaaggatttcccgcctagtcccgcgcggatggatgctctgctgaaagccggcacattgcgcctgagcctgacctttaaccccgcgcatgcgcagcaaaaaatcgccagcggcgatttgcctgcaagcagttacagttttggctttcgcgaggggatgattggcaacgtgcatttcgtcaccattcctgccaacgcgaatgccagtgctgcggcgaaggtagttgccaatttcctgctcagtcccgatgcgcaactgcgtaaagcagatcccgctgtctggggcgatccttctgttctcgatccgcaaaaactgcctgacgggcagcgcgaaagtttgcaaagtagaatgccgcaggatctgccgccggtactggctgaaccgcacgcaggttgggtaaatgcgctggaacaagaatggctacaccgttacggtacgcattaatctttttgctgtgggcgatggtggcggtgatttatgcaccgctgatcccggcagctctcacgctgataagccctgctttgagcttgacacactggcaggcgttatttgccgatccacagttaccgcaggcattactggcaacgctggtgagcacaaccatcgcggcggtcggggcattgttgattgccctgctggtgattgtggcgctgtggcctgggccgaaatggcagcgtatgtgcgcccgtctgccgtggctgctcgccattccccatgtggcttttgccaccagcgcccttctgctctttgctgacggagggctgctttatgactatttcccgtatttcactccgccaatggaccgatttggcatcggtctgggcctcacccttgcagtgaaagaaagcgcatttctgctgtggatcttagcagcagtattgagcgaaaaatggctgttgcagcaggtcattgtgctggatagcctgggctacagccgctggcaatgcctgaactggctgctgttgccctccgtcgcgcctgcgctggcaatggcgatgctggcgattgttgcctggagcctgagcgtcgtggatgtggcaattattctcgggccaggtaatcccccgacgctggcggtaattagctggcagtggttaacccagggcgacattgaccaacaaacaaaaggcgcgcttgccagcctgctgttgatgctgttactcgccgcctacgttttgctgagctatctgctatggcgcagctggcggcgcactattccccgcgtagatggcgttcgcaagcctgccacgcctttattgccgggcaatacgctggcgatttttttacccttaaccggtgtgctgtgtgtggttctgctggcgatcctcgcggatcagagcacgatcaatagtgaagcgctcatcaacagcctgacaatggggctggtggcgacattcatcgctttgctcctgttactgctgtggctggaatgggggccacagcgtcgccagttgtggctatggttgcccattttattacctgctctgccactggtggcgggccagtacacgctggcgctatggctgaaactggatggaagctggacggcggtggtctgggggcatctgctgtgggtgatgccgtggatgctgtttatcctgcaacccgcctggcagcgcattgatagtcggttaattttgattgcgcaaacactgggctggagccgggccaaaatcttcttttacgtgaaatgcccactcatgttgcgccctgtgctgattgccttcgcggtgggatttgcagtcggtattgcgcagtatatgccaacgctgtggctgggcgcggggcgttttccgacgctcaccactgaggcggtggcattaagcagcggcggcagcaacggtattctcgccgcccaggctttatggcaactgctattaccgcttattatttttgccctgaccgcgttagtcgcaaaatgggtaggttatgtcagacaaggactccgctaatgctctgcgtgaaaaatgttagcctacgtttaccagaaagccgcttgctgacaaacgttaactttacggtggataaaggtgacattgtcacgttaatggggccgtctggctgtggaaaatccactctgtttagttggatgattggtgcactggccgaacagttttcttgtacaggtgagctatggctcaatgagcaacggattgacatcctacccaccgcacagcgtcagattggcattctttttcaggatgcactgttatttgaccagttcagtgtcgggcaaaatttactgctggcgctaccggcgacacttaaagggaatgcccgacgtaatgccgtgaatgatgcacttgagcgtagtggccttgagggagctttccatcaggatcctgccactttgtctggcggtcagcgagcgcgcgttgctctactacgcgcccttctcgcccaaccaaaagcgttactcctggatgagccattcagccgtcttgatgtggctctgcgcgataattttcgccagtgggtgttcagcgaagttcgcgccctggcgatccccgtcgttcaggtaacgcacgatctccaggatgttcctgctgatagttctgttctggatatggcgcagtggagtgaaaattacaacaaactgcgataacgcaaagtttttctcaatgcgtcagttcagaatggcgcactcaaaactacaatgtcgggattttcgatgaaacgtgtttctcaaatgaccgcgctggcaatggctttagggctggcttgcgcttctagctgggccgctgaactggcgaagcctcttacacttgaccagcttcaacaacaaaatggcaaagcgatagatactcgccccagcgcgttttataacggctggccacaaaccttaaatggcccttctggtcatgaacttgccgccttaaacctctctgccagctggcttgacaaaatgagcaccgaacagctcaacgcgtggatcaagcaacataacctgaaaaccgatgctccggtggcgctgtacggtaatgacaaagatgtcgacgccgtcaaaacgcgactgcaaaaagcaggtttaacgcatatctccatcctgagtgacgcgctaagcgaaccttcccgtctgcaaaaactgccgcattttgagcagctggtttatccgcaatggctgcacgacctgcaacaaggtaaagaggttacggcgaaacctgccggtgactggaaagtcattgaagcggcctggggcgctcctaagctttaccttatcagccatattcccggcgctgactacatcgataccaacgaagtggaaagtgaaccgctgtggaacaaagtttctgatgaacaactaaaagcgatgctggcaaaacacggcattcgccatgacaccacggtcattctgtatgggcgtgacgtatacgctgcagcgcgtgtggcgcagattatgctttatgctggtgtgaaagatgtgcgcctgctggatggcggctggcaaacctggtccgacgcgggactgcctgttgagcgcggaacgccaccgaaagtgaaagcggaaccggatttcggcgtgaagatcccggcacaaccgcagttgatgctcgatatggaacaggcccgtggactgctgcatcgccaggatgcaagcctggtgagcattcgtagctggccagaatttatcggtacgaccagcggttacagctatattaaaccaaaaggtgaaatagccggcgcacgttggggacacgctggtagcgacagcacgcatatggaagattttcataacccggatggcaccatgcgcagcgccgatgatattaccgctatgtggaaagcgtggaatatcaaaccagagcagcaagttagtttctactgcggcaccggctggcgcgcgtccgaaacctttatgtacgcacgcgccatgggttggaagaatgtttccgtgtatgacggcggctggtacgaatggagcagcgatccaaaaaatccggtagcaaccggtgaacgcggcccggacagtagcaaataacattgcaattactgacgctggaggctcttcagcgtcagatacccactccacacccgcgtaaaggtcgtcatccagcacaacgcaccgaagatccacgcaaaccacgcaaaccatgcagggaataaacatcccagcacaaacagtaagatcgtttctgtgccttcggttaatccccccagatagtaaaagctcttatgtgcataaccggggttatcaatctgatgttttgctgccagtgcagcaaaggcgagaaaactgctgcccgtgccgataaacgcaaacaacaaccagccgcctgccagcgcattttgctccggtgcagcaagaataaagccaaacggcaccagcgcgtaaaagagaaaatcgagagaaatatcaagaaagccgcccgcgtcggtaagctctctgcgccgcgccagcgcaccgtccagaccatcaagcagcctgttcaacaaaatgacgactagcgccgccagataccagcccagcgccagaaacggcagagccagcacgccgatggcaaatcccactaatgttaaaccatctggcgtaatgcccggtttatcaagaacccgcacgcactgatgcaacaacggtttaatccggggatgaagatggcggtctagcacaggcactccttaaatataaagcctttctgattgagcaacagtgcggatattatggcatttttcgcttatctgcccgtgtgtaatttatgaaaatgattgaagttgttgccgccatcattgaacgtgatggcaaaattttactcgcgcaacgccccgcccagagcgatcaggcgggattatgggagtttgccggtggtaaagtcgagccggatgaaagtcagcggcaggcgctggtgcgtgagttacgcgaagaactgggcatcgaagcaactgtgggtgaatatgttgccagccatcagcgagaagttagcgggcggattatccatcttcatgcctggcacgtacccgacttccacgggacgttacaggcacatgaacatcaggcgctggtctggtgcagtcctgaagaggcgctgcaatatccgctggcccctgctgacattccattattagaggcgtttatggctttacgcgccgccagaccagcggattaattatggctttacgcgccgccagaccagcggattagtgctaagggttttgtcatcacgctggcattgcagcagtattccttcggctttaattaccgccccttcagaataattttgatcctgataaacgcagcactgagtacagggctgcgcactctgcccgccactactgaacacttctggcggtacgtttacctccacgtccggacgataatgcgggttagccagtgcaattaatggaaatgctaatactacggcgaacaatgctcgactcacagggaactccttaacgttattgtctctgctactgataacggtagccgggtggcaaaactttagcgtctgagttatcgcatttggttatgagattactctcgttattaatttgctttcctgggtcatttttttcttgcttaccgtcacattcttgatggtatagtcgaaaactgcaaaagcacatgacataaacaacataagcacaatcgtattaatatataagggttttatatctatggatcagacatattctctggagagtttcctcaaccatgtccaaaagcgcgacccgaatcaaaccgagttcgcgcaagccgttcgtgaagtaatgaccacactctggccttttcttgaacaaaatccaaaatatcgccagatgagtttactggagcgtctggttgaaccggagcgcgtgatccagtttcgcgtggtatgggttgatgatcgcaaccagatacaggtcaaccgtgcatggcgtgtgcagttcagctctgccatcggcccgtacaaaggcggtatgcgcttccatccgagtgttaacctttccattctcaaattcctcggctttgaacaaaccttcaaaaatgccctgactactctgccgatgggcggtggtaaaggcggcagcgatttcgatccgaaaggaaaaagcgaaggtgaagtgatgcgtttttgccaggcgctgatgactgaactgtatcgccacctgggcgcggataccgacgttccggcaggtgatatcggggttggtggtcgtgaagtcggctttatggcggggatgatgaaaaagctctccaacaataccgcctgcgtcttcaccggtaagggccttagttttggcggcagtcttattcgcccggaagctaccggctacggtctggtttatttcacagaagcaatgctaaaacgccacggtatgggttttgaagggatgcgcgtttccgtttctggctccggcaacgtcgcccagtacgctatcgaaaaagcgatggaatttggtgctcgtgtgatcactgcgagtgactccagcggcactgtagttgatgaaagcggattcacgaaagagaaactggcacgtcttatcgaaatcaaagccagccgcgatggtcgagtggcagattacgccaaagaatttggtctggtctatctcgaaggccaacagccgtggtctctaccggttgatatcgccctgccttgcgccacccagaatgaactggatgttgacgccgcgcatcagcttatcgctaatggcgttaaagccgtcgccgaaggggcaaatatgccgaccaccatcgaagcgactgaactgttccagcaggcaggcgtactatttgcaccgggtaaagcggctaatgctggtggcgtcgctacaagcggcctggaaatggcacaaaacgctgcgcgcctgggctggaaagccgagaaagttgacgcacgtttgcatcacatcatgctggatatccaccatgcctgtgttgagcatggtggtgaaggtgagcaaaccaactacgtgcagggcgcgaacattgccggttttgtgaaggttgccgatgcgatgctggcgcagggtgtgatttaagttgtaaatgcctgatggcgctacgcttatcaggcctacaaatgggcacaattcattgcagttacgctctaatgtaggccgggcaagcgcagcgcccccggcaaaatttcaggcgtttaactgtatttaacggaacttgctccccacggaacatttcttatgggccaacggcatttcttactgtagtgctcccaaaactgcttgtcgtaacgataacacgcttcaagttcagcatccgttaactttctgcgatagcagcagatatgccagtaaagaaatcccatttgactatttttttgataatcttcttcgctttcgaacaactcgtgcgcctttcgagaagcaagcattatataatgccaggccagttcttcttcaattgtcccgttttgaaaagctgtgctacttatgctgatcatccaacttaattccgccgcccatattagcttcgcgctggatttaccggagctatgattagcgcaatcagagatatagtcactgggaaaaacagcaaatttattcaacaaggcgataacctgctctggggcttcctccatgtttgctttaaaggtattggctccatggtcgccagaaagaaaatgctccattaaggcacaataactttcgctatcttcgataccccattgatcctctaaagactcgcgtcttttacttatgatatcgatgctgtcaaaaggaagcacatgatattggaaggtatctttgccaggttcaggctttcgcggccagaactccagcgtttcagaccattgcttatgatagaatcgataaggtgcgatcaattgtagcgcctgtaacttctcgatactgagcggctcaatacctttagcctgataataatgcagttgttctttttttgctttaaaaccggcccgaacaataagccccatcataattaatagataaagaaaagagcatcccgcggtaatcaggcctctttcattcaaaccgttggatgttatcgctgcgaacacaaacattacagcgacaacacatgttaaataaaacccccacttacaaagcagcatggccttattttctttaatcatccgttcaaaattactattaaatatttcccagccattaaaagaatacttctcgctcccaggatggttttgtaataaaacttttttcatcacattccctgttattacatactttagaggcgataattttatccatgcaaaaaaaatatccaacgaattttcttgatccgctggatatttcagaatatgactcgaatagcacgaaagattcactcgcttacgctatcgccccgcttccgacttcatctgctggcggactttttttcgcactacgtttacgcggtgcagcctttttcttatcagcactgccaccactgcccggagccacaatgccgcgaaactgccgcaccggcgtacgtttggcttgatcaataagctgatatagcgtccccaccagcggctgcataaagtcctgatagcgacactgcttttcgctgatttgcgtcagcacgctttcccagtgcgcggtcatgtccggtcgcgtcgccatctccggcaggctatggaatagcgcttttccggcgtcggtggagtggatatagcgcccttttttggtcaggaaaccacgcttgaacaacagttcaataatcccggcacgcgttgcctctgtccccagaccatcggtcgcacggaggatctttttcagatctttatcctgcacaaagcgcgcgatcccggtcatcgcgctaagcagtgttgcatcggtaaaatggcgcggcggctgggtttgccgctctaccacttcacctttttcacacagcaactcatcgcctttcgccaccacaggcagtggcgtgccgtcgttttcttcatcgcgctctttgctgcctaacagcgtgcgccagcctgcttcagcaagaaaacgcgctttagcgacaaatttgcctttggcaatgtccagttcgataacacacttgcggaacaccgcatccgggcagaattgcatcagatactgacgggcaatcaggttatagaccttcgcttcgttctccgtcaggttgatcgcagaactccgtgcggtcggaatgatggcgtggtgcgcatcgacctttttgtcatcccaacagcggttgcgtatatctggatctaccactggctgcggcaacagatccggtgcatgaacactgatggcattcatcaccgcgtggcgtccggcaaaatgttcttctggcaaatagcgacaatcagaacgcggataagtgattagcttgtgcgtttcgtacagtttctggcagatatcaagcacgttctgcgcactcagaccaaaacgttttgccgcttcaatctgcaacgcactaaggctaaaaggcagcggcgcggattcactttcccgtttatcgttatagctggtgacaatagccggttgaccactaatgcggttaaccacatgctccgccagtggacgatgtaacaagcgcccttcttcatcctggtacggttcacacgcttcgctcggttgccagatagcggtaaaccgctcatcggcaggtgtcacgatatgtgctttgacttcaaagaagtctttcgccacgaagttttcaatctcttcatcgcggcgcaccaccagcccaagcacgggcgtctgcacgcgtcccacggaaagtacgccctgataaccggcattgcgaccgagaatggtatacgcacgggtcatattgatgccgtacagccagtcggcacgcgctcgcgccagcgcagaaacgcacagcggtacaaactcactgttggaacgaagacggtcgatcgcccgctcaaccgcctgcgggttcaggtcgtttatcaagcaacgctgtacctgctggcgcttttccggtgccagttgcagatagtccagcacttcatccaccagcaattgcccttcacgatccgggtccccggcgtgaacgatttcgctggcttcatgcaggaaccgtttgatgacgttaagttgtttggtcacggagggtcggggctgtaattgccacttttccgggacaatcggcaaatccgcaagattccagcgcgcatagcggctgtcgtaggcgtctggctgcgcctgctcaagcaggtgaccgatacaccaggtcaccacctgaccattaccgcactcgataaagccatcgcctttccggtgcggtttgggcaggacatcagcaatggcgcgcgccagactcggtttttcggcaataaacaaccgcattgaattaacgaatctcaaccatggcacgaccgccgcgcgctggcaccagttcgccaattgccgtcagttcaatgccaaactcggcggctgtagctttgacctcattttctgcttccggcatgaccgccagcagcaaaccgccagaagtttgcggatcacacagcagatcgcgcacttcacgcggcatttcacccatcagatgaccgtagctggcaaagttacgttcagtgccgccaggtactgcgcccaacttaatgtactcttcaacaccggggagtttcgggatcgcttcatagtcgacgcgtgcctgcacaccagccccctgacacatttcgctcaagtggcccagcagaccaaagcccgtaacgtcggtcatcgcttttacgccttcgatgttggcaaaggacgcgcctgcgatgttcatccggcacatcacttccgtcgccagtccctgatgttctggtttcaacagactttttttctcagccgtggtaagaacgccgatccccagcggtttcgtcaggaacagtttgcatccggcttgtgcggtactgtttttcttcacccgctcggtcggtacgatccccgttaccgccagaccaaaaatcggctccggcgcatcgatggagtgaccgccagccagcgcaatacccgcctgacgacatgcatagcgtccaccttcggtcacttcgcgggcaatttctggggaaagtttgttaatcggccagccgaggatcgcaatcgccataatcggtttgccccccatcgcgaagatatcgctgatggcgttagtcgccgcaatgcggccaaaatcgaaaggattatcaacgatcggcataaagaagtcggtggtactgataacgctggtgccattgcccagatcgtacaccgccgcatcgtcgcgggtttcattacccacaagcaaattcggatcaacaaacttcgcctgctcactatgcaggatggtttccaacacttttggggaaattttacagccgcaaccagctccgtggctgtattgggtcaaacgaatgctgttctcgctcatggacatctcctgtcaatgcaatccgggtatggtaaccctcattccgtgaagtgataagtgagagtgtctgaattcctgcgcctttgctcacaatccagacagtttcgcgacaattatcagaaataagttacaaacggcgtcgggtccgggacgttaatgctcgtagatgctttcagctgcggcgtaccgaggtagagaaaaccgacaattttatcctgctcacggcaaccgaatgcttcacgcactaccggactttcagttaatgcgccactgcgccagatgccgccaaacccctgggcaactgctgccatttgcatcgccatgaccgcgcatccggcagacatttcctgttcccagcgcgggactttatgattctcttcgcatttcgccaccaccgtgatgatgagcggtgcgcggaacggcgcattacgggctttgtcgatagctttgtcatcactaccggcagcaatcgccccctgttccagtacggcgctgaaacgctcgcgcccttccccttcaatcacaaaaaaatgccacggttgcatggacttatggtccggcgcacgcatacccgcacgcaggatgttttgcagttgttcacccgttggcgcgggttcagccaagcgggaggcgctacggcgattgatcaatagttcgagtgcatccatttgattaactcctgtcgtgatatttattcacaaaattaacacgagagtggattttgttacagcacagtccgcaattcctgctgacaagtaccggttgggtcattacgataaccacatctattgcgcctgtgacaggtgtgaccttaagttgggagaatacatgcgaaccctttggcgatttattgccggattttttaaatggacgtggcgtctgctgaatttcgtccgtgaaatggtacttaacctgttctttattttcctcgtactggttggtgtggggatttggatgcaggtcagtggtggtgatagcaaagaaacggccagtcgtggcgcactgctgctggacatttctggtgtgatcgtcgataaacccgacagttctcagcggtttagtaaattaagccgccagctgcttggtgccagttccgatcgtctgcaggaaaacagtctgtttgatatcgtcaacactattcgccaggcgaaggacgaccgcaatatcaccggtattgtgatggatctgaaaaacttcgcaggcggcgaccaaccgtctatgcagtacatcggcaaagctctgaaagagtttcgtgacagcgggaaaccggtttatgccgttggcgagaactacagccaggggcaatattatctcgccagtttcgccaataaaatttggctgtctccgcaaggcgtggttgatctgcacggctttgccaccaacggtctgtactacaaaagcttgctggataagctgaaagtttccacccatgtgttccgcgtgggtacgtataaatctgccgttgaaccgtttattcgtgatgatatgagtccggcagcccgcgaagctgacagccgctggattggtgagctgtggcaaaactatctgaatactgttgccgctaaccggcagatccctgctgagcaggtattccctggcgcgcaagggttgcttgagggtttaaccaaaaccggtggcgataccgcgaaatatgcactggaaaacaagctggtcgatgcactggcaagcagtgcggaaatcgaaaaagcactgaccaaagaattcggctggagtaagactgataaaaattatcgcgccatcagttattacgattacgcattgaaaacgccggcagataccggtgacagcatcggtgtcgtctttgctaatggcgcaattatggatggcgaggaaactcaggggaatgttggcggtgataccactgcggcacaaatccgcgacgctcgccttgacccgaaagtgaaagcgattgtcctgcgtgttaatagcccaggcggcagcgttaccgcgtctgaagtgattcgcgctgaactggcagcagcccgggcagcgggtaagcctgtggttgtaagcatgggcggcatggcggcatctggtggttactggatttccacgccagctaattacattgtggctaaccccagcaccctgaccggttctatcggtatcttcggcgtgatcaccaccgtagaaaatagtctggatagcattggtgttcatactgatggtgtcagtactagtccgctggcggatgtttctatcaccagggcactgccgccggaagcgcagctgatgatgcagttaagcattgagaatggctataaacgctttatcacgctggttgctgatgcgcgtcatagcacgccggagcagattgataaaattgcccagggccacgtctggaccggtcaggatgcaaaagctaacgggctggtcgatagtctcggggatttcgatgatgcggtcgccaaagcagcagagctggcaaaagtgaaacagtggcatctggaatattacgttgatgaaccgaccttcttcgacaaagtgatggacaacatgtctggttctgtccgggcaatgttgccagatgcgttccaggccatgttacctgcaccgctggccagcgtagcctctaccgttaaaagtgaaagtgacaagctggccgcgtttaatgacccacaaaaccgttatgcgttttgcctgacctgcgccaacatgcgttaagtcttgtactgagtggccgacagatcgtcggccacattattttttacgtcgacgaatcctcttcccgctgtttcgccccatatttccttatccgcatagtatcaggtgcgctccccctgcctcacgtatatacttttgctctttcgatatcattcatatcaatatcatgcaaaagaaaagtatttacgttgcctacacgggcgggaccatcgggatgcagcgttccgagcagggttatataccggtgagtggtcatctacaacgccaactggcgctgatgccggaattccatcgcccggagatgccagatttcaccattcatgaatatacgccgctgatggattctagtgatatgacgccggaagactggcagcatattgctgaagatattaaagcgcactatgacgactatgatggttttgtcattctgcacggcaccgacacgatggcgtataccgcctctgcgctgagcttcatgctcgagaatctcggtaaaccggtcattgtgacagggagtcaaatcccgctggctgagttacgctctgacggacaaattaatctgctgaatgcgttgtacgttgcggcgaattatccgatcaacgaagtaacgctctttttcaataaccgattgtatcgcggcaaccgcactaccaaagcccatgccgatggttttgatgcgtttgcctctccaaaccttcctccgttactggaagcaggtatccatattcgtcgtttgaatacgccacccgccccgcacggtgaaggggaattaatcgttcatccaatcaccccacaaccaattggcgtagtgacgatttatccagggatttctgctgacgtcgtgcgcaattttctgcgccaaccggtgaaagcattgattctgcgctcctatggcgtgggtaatgcgccacaaaacaaagccttcctgcaggaattacaagaagccagcgatcgcggtattgtggtggtcaacctgacacaatgtatgtccggtaaagtgaacatgggtggttatgccaccggtaacgccctcgcccatgccggcgtaattggcggtgcagatatgactgtagaagccacgctaaccaaactgcattacctgcttagccaggaactggatactgaaaccattcgcaaggccatgagccaaaacctgcgcggcgaactgacgccggatgattaaggagactgtaatgccccctcgcgccctgttactggtcgatttacaaaatgatttctgtgctggtggcgcgctcgccgtgccggaaggtgacagtacggtggatgtcgctaaccgcctgattgactggtgccagagccgcggtgaagcggttatcgccagtcaggactggcacccggcgaatcacggcagttttgccagtcagcacggtgtagagccttatacgccaggccaactcgacggtttgccacaaaccttctggccagatcactgtgtgcagaacagtgaaggcgcacaattacatccgttactgcaccaaaaagcgatcgcagcggtgttccataaaggcgaaaatcctttagttgacagttacagtgccttttttgataacggccgtcggcagaaaacctctctcgatgactggttacgcgatcatgaaatcgatgaattgatcgttatgggcctggctactgactattgcgtgaagtttaccgtgctggacgcgttacagttaggttataaggtaaacgtgattaccgatggttgtcgtggcgtgaatatccagccccaggacagtgcgcacgcgtttatggagatgagtgcagctggggcaacgctatatacgctggcagactgggaagagacacaggggtaattttacgctggcctacaattctgtactggcattgtaggccaaataaaacacgtcagtggcacatctggcaattgatgccatcaacgaaagatttaattcacctcagaaatctcttccaagctcaccttccgcgtttcgatgccaaaaatggagagaaccagcgcacagagcaataacataacaccaagtaccataaacaccgtgatgctcccataatgtgttaataatgccgcaacgccatagggcgtgaagactgcgacgatccgtccgacggcattaacgaaaccgctaccgcgcaggcgtaaatgcgttggccaaagctccgggatataaaccgcgctcgcgaagcaaacatacatgtataaaaagaagatcatcaccagtccatagattaaaatcgcccactctgtagtctgaatactatagatatagcctaacacggcaataataataagtaaggtggagccaaataaccgacgaggaaaatgatcaataattaatgccgcaataaatattcctaccggagcgccaatcataataacagcggtcattaatatacttttatcgacatcaatgccggagttaacaaatatggtcggtatccatacggtgatggtataaaggctaatgttcattgcaattaaaacagtaatcgcgactaatgtacgtcgtaacatttcacctttaaacaggagccagaaagtacccttgattactttaaccttgctgttgctctgatagctagtaagcgggggtaaacgaatactcttctctctttcaatttgctgctctacttcacgaagttggcattctgcacctgcgatttgccctttccctgccagccatcgtgggctctcgataaagtatttaccactgagaaaccaggctaacagtatgccaataccacccagcagaaacattattcgccaactaaaaaaagcgataaccaccacgcctatcgccgcagacagcatggggctccagttaccaacaaaactgagccgcgcggaccattttccacgcaccgtcgcggggataaactccgtaaaactggcatagccaaccataatcagcgcccccattcctgttcccatcaggaagcgaaagaagatgagccagtacatatcagggacaaaagcggcccctgttgcagcaataccgacgatgagaagatttatgcgaaacgccctgcgccgcccaaagtagtcaccaataaacccaccagtaagactgccgatgaaataaccaaacattaatgcgctggtaaaggcggcattgaggaaattattactccatccattgcttaccagctttgctaagacgacattaccggagtaactcaaaaaccctgttaataacagactaaagcttataataccaaatatacgataatgaaaccgggccaaaggcaagcggtccagtcttgcgccaatttgatcatattgttccattaggtgcctcggatttgctaaaaaggtagcaattgcggcaaattcacttgccgcatctttatcatcattttatttcaaggcgcaggaacaaataatattgacaacgtgtgcttaaattaccacaccagctggatattattgtctttgcaaaatgctatccactctgcacccggacttttatcagttattatgtaattaatatgactaaaatcagctaactggacaaaagctttgcgatcaaacttagagtgatcaaccaataacgcaacttctgtcgcctgacggatcattgtctttttgatttcagcttccgcttcattagagtccagcgcgccgctgttaatatcaagacctttacaactcattaccatgatatcgacatgatagcgcctgatgatctctttagtaattcttccttgcagactaagtgtatttttgtttagttccccacccgtactaacgactttaatttcactctgagccagaacatgaatcgcttccgcgctgttggttagcaacgtcaggccactacggtcctgtaacaatttgagcaattccattacggtactactggaatcggctgccatggtggttttattgtcgataaagggtagtgccttgcgtgcaataagctgcttctcttcataaaagctactagcgcgcttataaaaatggatattctccgtcaacatcgctgtatttaaaacagcaccaccataggttctggtcaaaaagccttcatcttccagcttctcaagatcgcggcgaatggtttcttcggttacctgaaaaatcccactcaaattactgactgtcacctttttatcgttggcaaccatttgcttaattgcctgaatcctgtcttttgccgccacgattacacccctgtatctttttacatcacattagcgcgattatcgcataaccgatgtttactttcaaaataacctgtttgaatcacagattttcatcacagttttcacagaaacagaggtgaatcgtgttgagtatttaacgctccagggcctctgccatttccctcatcaatgttgcgtctgcatcgcttaagttgatattcagtgccgcgacattttcgcgtacctgttccggtgcagtagccccactaagaatggagattaaatcactctgttttaatatccacgccagtgccagagtgggaattgtgcactgataacgagcacaaagtggctgccactgttcaagcatatcaatcactttcagcatgttttcacgctggaaccagactttatttgcccgagcgccgcccggaacgtaatcacgagtgatggtgccggtcaacaatccctgctctagcggggaataaacctgaaccacaatgccattatcacgacatagtggcagcagttcgttttccattgcccggtcgaggatactgtatttcgcctgaataatatccagttcaccatattgcagatactcgcggatatggtcagcatcgacgttagcagcgcctatagcgcgaattttcccttcagactttaactcattaagcactgcgacagtttcagcgatcggcgtaaaaaatggcggcacgctctgccagtgcgtcatgtagatatcgatgtaatcaatacccagacgttgcaagctcgctgctacctcttcgcggatagattccggggaaaggtttttatacaactgccgatcgccaactttgttgaataaacttccttttcgttcccagacaatgccgcatttggtttctactacaacctgttcacggggcagtttttttaacgcctgaccgacgataacttcactattgccaaagttatatcctggcgcagtatcaatcagattaatgccacaacgatgggcttcaagaatcgtatcaatacatatttgccgatcgagatcgccattccatgcaggaccgccgccaatggcccatgtccccaaccccattcggctaagcgtaatatccgttgtgcctaaaggtatctttttcatttgccttcattatccttcgtattcttccagcaattgttcgaccagctttctgttttttacgccggtggtggcaccgacgcttagaacgctgatagccgccgttgcattggcaaagcgtgcgcattcacgcagatttttgccttctaacagtgccgcaataaaaccactagcaaagttatcgcccgcgccaatggtgtcgatggcggttattcctgcgaccgccggcaccttcatcgtcatgtcaccacgcttgataaagcagccgtctttacccgttttaatcaccaccgtttttacgccgcacgcaagaaagcagtcagcaatttcatccagtgtctctttcccggtgagtaattttgcctcggcaaaattaggaaacagataatcgacataactcaatgcttcgcaaatatcatccagcgtttcattcaaccgcggtttgatcatatcggcacagataatcatctgccgggctttagcttgcgtaaaaatttctgttagcgctttaccatccaatagtggactgttgaaaatactggccagacttaataatttcgcctgagaaaaccgcgcaaaatcaacatcgtcaatattcaatttccacagactgccattacggtttgtgacaaacgtccgctcgccatcctccgtcaccagtccaacgttaatagaggtatctatgctgacgtcctgcttcaggctttgaatatcaatattctctttgcggcaatggtcgagaataaattgccctgcggcatctttaccaatacgactcattaatgctgtgcgatggcccagacgagaaataattgttgcttcatttattgcatcacccccggtggtcattgcgattctttcaagaggataagaatccacatcaaagatatttttactgaccggttgcaatggaatatcaacaatagcggcacctatacaaataacgtcgagattatccatatcattattccgctttgccatcagaaccgaacagtttaattttttccaatgcccgttcttttacagctttacgtacttcacgttctaaatgcaggaaaggctgatcctggttttctttcactgcaaccattgcggcctgacagagctccgtatgaatgttgattttcgcgatacccaagctaattgcagttttaatgtcggcatcactgatcccgcttgcaccgtgcaaaaccagcggaacagaaacggcatcgcgtacgcgtttgacgacctcaaagttcaattgtggctcactcgtataaaccccatgctggttgccgatggcgacagccaaactatcacagcccgtacgttcaacaaattcagccgcctggtcaggatcggtatagtgatagcccgccagcgcttcctcataaacggtttcattaccgacatgccctaattccgcctctaccggaatacccagcggatggaagaaatcgacagcctctttggttaaacgaatattttcttcgaaatcaaacgcggaagcatcacgcattaaactattcataccatgagtccaggcgttatgaataatctccatactccgaccatgatcccaatgagttattaccggcaccgttgctttttgtgccatacttaccatcatgtgagagaaatcttcaaaactggtgttaccgacaaaacctgtaccaaaagaaataataaccggggatttcgcttcttcggctgcgtcgataacgcccatcaacatttctgcattccatacgttaaaatgggcaattgcataatgtttatttgtggcatcgttttcccaatatctgatatctgcgagcatgttctgttctcccgtattaattaatcgctaattttaataacgcctttaataatgtcgcgtttgttgttaacactctcttcaaatgcctgttgtacatcccgataatcgtaaatatgcgtcaccatgcttttcacatcgaatcgcccactagaaatagcttcaatcgtgaccggataacgattggcatagcggaataccgtctggatagtgacttcgcgattgattttgaggaaattgattgcgctatcgccgggtacagtaccaacaatcataattttaccgccgcgcattaccagataaggtgcctgtttaacggtgaccgcagaacccgctgtttcgaaaacaatatctgcgcccatgtcttcggtaaattgctgacagcgtgcaatagtgtcttcttttgcgccgttaataaccactgtcgcaccaagctgttccgccattgccagacgtttttccagcacatcaacgacggcaatttccgttgctcccaggcatttgcacgcttgcaacgtcatcaaaccaatacaacctgctcccagaataattatcttcttacccggtttaacatctgccagcatcgcggcatgcatcccgactgcggcaggctccaccagcgccccttccatcgtgtccatattgtcgggcagtttgtaagtaaagctctccggatgacacagatagtgcgttaatgcgccgcggtagttgggttgtgtcgccataaaatcaacgtccgggcagatgttatatttgccttccagacagtaacgacagtgaccgcaaggaacgccaggttcgatatttacccgatcccccggtttaaatttgcgcacgcggcttcccacagccacaaccgtcccggcgcattcatgacccaggccaatttcttgatttgggtctttaggcggaataaacgggccactttcaaaaccatgtacatcactaccacaaataccgacatattctactttaatcaaaacttcatcttctttaggcactggtatttctgcactaataattttcattgtgcccggcacctgcaatattgctttactatttttcattttgaatccacccgtattatttattggctactgcatcaatacttaaactttcaacggagacacctttggtttcgattccaatggtggcgatagcaattgcgacaataatactaaccgcccccagaagaataaagactcccgtaacgccataactactgagcagcactgcaacggcataaggtgcggcaataccactgattcgccctaccgcattcgccagaccggagccacggagtttggcctctgtcggccagatttcagggacatacactgcgctggcatagcaaacgtacatatagacgaaagtaatcaggaagaaaccaatcaacgttatgagcaacatactggtttgcagactatagatatatccgagcaccgcaatcaggattaatagccccacacccattgttttacgcggaattttatccatcaccagcatggcaataaaaataccaaatggcgcgccaaacatactcatggtatttaaaacaatgctgtcttttaaattaatcccctgggtcatgaatattgttggcaaccagttaattagtgtgtactgcacaacgttcatggcaatcagcacacaagagcctaatatcacgcgtttcagtaatactcctgtcagtaaggcactatacggcaccgcttgtggcgctttaccgtcatcagcaataaccacaggcggcaaaggtttacccgtctggcgtatgacgccttcttctatactccgcatgactttctcggcttcctgataccgtccgcggctttccagccagcgcggggattcaggaaagtagcgccaggccagcgccgtagcgataaggctcaatattgcagggataagcagttgtacccgccagttccactctgcactaatcagcggcgtgagtcccatcgctatcaaactacagagcggataactccagttgccaataaaggaaacccgactactccacgttccacgatttctaccgggcatatattcggtgaaaccagcaaacagcgtaaccagtaaagctcccagcccaactcccatcacaaaacggcaggcaataaggaaatccatattcggactgaaagcaccgacaaccatgctggcaatatgaatggcctcatagaggatgaacgcatttctgcgaccggttttgtcgccaatgatgccgcccaccagcgcaccgagaaacattccggcggtcgtgattgcactgaatgtggctgtggtggaattatctgtccagcccaacgctttcagctgcgcgaggatcaagccaccaacggcattactccagcagacaagcaagccaaacgcgacgatggcaaacatactactatgccagcggcaatccggtaagcgatccagccgtgcaccacaatgcggttttgttatctgttccatgcgataacgttccttcaggagagtggttattcatcaaagtcgtaagtcatgatcactttgattgcggttttatcgaccatcgcatcaaacccttcgcgccattggctcaggccgatacgatgcgtgatcatcggtttgactttgatagcgccgctggctaatagcctgatagcgttacgccaactggtggagtcataggccatatgcccaatgatgcttttgttccaggcggtaatgtcattaatgctgaaatcaagaggtttgaagcccattccaacgcgtaccacttccccgttcgggcggagcatttcgatggcttgtttcagtgcgatattggcaccggagcattcaatcaccagtcccagattgtctttgccacaaatttgctggcagcgcgccaccacatcttcggtagaaccatttactactgccgtcgcacccagttcttttgcaaccgggaagcggaccgccacatcttcttgcagaccaacgacgacgatatttaccgcccccataattcgcgccatttgtacggagaacagcccgagtgggccagtgccgatgacgaccacatcctgaccaggaaggaatttgctttgctgcgcgatggatttgtaggcattacagatagggtcaagtacggctgcgtcctcataatcaacaccatcagggatttcccacaacgcatgacgatgaattttgagaatttcaccaggaaccagacaatatttggaaaaaccaccgccccaggtattattatccagaccaaggtttactttttctgtacaacacagaaaatcaccttgttcacaggccggacaaacaccgcaaacgtgaccgctgttatcgcttacgacgcgttgccccactttccagtctttgactttttcaccaacctgcgcaatacaacctgcgaactcatggccgcggatagagttaaactcatcagaaccgctatcgacattgtagtgcttcatgtctgcgccgcagattgccgcggctttaatttcaatcactacatcttccgggccacacatgggttgtgggacatcaatcatcttgtagccgccaaaggccttgccaaaccgagccagtgctttcattgcgtcatcctctgtgtttagttttgcttagatggccatcatacttacccacatgatttttgaggtcaacattaaatctgtaaaacacagataatgatctgcgttttacaactcagatcacaattacgcagaaaatggctgggtctgttacaggttgatggaaggcggggcgcaaaaagagcaaattcgagagggattaccggccaaataggtctgagacttaagttcaggagaagtcattcaggtgtgaacgggacggcaagagatcggactgggacttagccaggtcatggcgagataattgagatgagtcgtggggtcattgttggctatccccttcatagccgaggcaaaaaggggatgaaccacttacttaaacatggcaataggctttgcactgataccaaaatcttcttttaactgctgtttgctcttcatgaccatctgaccatttgtgtcaattgtcatatgctgtgcttcgatattatggcgggcttgccacagcatcaccagttgcaggcagttctctttttgttcctcggtcaacgcaacgccatcaggccatttccccagttcaacggcggtgctcaaacgctggtatacctcaggcatcatgctgttgataatgtcatcaagattcataatttttccgctcctgtggaataagttgctgaatcgttttttcaaccgttgatttcttcgccgttttcgccatcggtaaagcgtaaagaggcagagttaacacaataacgttcgcccgttggctgcggcccgtcggggaagacatgccccagatgggcatcacagttaccgcaacgaatttctatgcgctgcattccatgactcaagtctttgatataacgaatggattcttcacttaccggttcgtagaaactgggccagccacagccggaatcatacttggtttgggaatgaaacagcggggcatcgcagatcaaacagtgatatacgccgtcacgcttgttatgcagtaaacgacccgtaaatggcggctctgtcccatgattctgcgtcacgtaaaactgcatctcggacaaattttttttcagttcttctgcgctaggtttattagccatttgctcacatctcactttaatcgtgctcacattacgtgactgattctaacaaaacattaacaccaactggcaaaattttgtcctaaacttgatctcgacgaaatggctgcacctaaatcgtgatgaaaatcacatttttatcgtaattgccctttaaaattcggggcgccgaccccatgtggtctcaagcccaaaggaagagtgaggcgagtcagtcgcgtaatgcttaggcacaggattgatttgtcgcaatgattgacacgattccgcttgacgctgcgtaaggtttttgtaattttacaggcaaccttttattcactaacaaatagctggtggaatatatgactatcaaagtaggtatcaacggttttggccgtatcggtcgcattgttttccgtgctgctcagaaacgttctgacatcgagatcgttgcaatcaacgacctgttagacgctgattacatggcatacatgctgaaatatgactccactcacggccgtttcgacggtaccgttgaagtgaaagacggtcatctgatcgttaacggtaaaaaaatccgtgttaccgctgaacgtgatccggctaacctgaaatgggacgaagttggtgttgacgttgtcgctgaagcaactggtctgttcctgactgacgaaactgctcgtaaacacatcaccgctggtgcgaagaaagtggttatgactggtccgtctaaagacaacactccgatgttcgttaaaggcgctaacttcgacaaatatgctggccaggacatcgtttccaacgcttcctgcaccaccaactgcctggctccgctggctaaagttatcaacgataacttcggcatcatcgaaggtctgatgaccaccgttcacgctactaccgctactcagaaaaccgttgatggcccgtctcacaaagactggcgcggcggccgcggcgcttcccagaacatcatcccgtcctctaccggtgctgctaaagctgtaggtaaagtactgccagaactgaatggcaaactgactggtatggcgttccgcgttccgaccccgaacgtatctgtagttgacctgaccgttcgtctggaaaaagctgcaacttacgagcagatcaaagctgccgttaaagctgctgctgaaggcgaaatgaaaggcgttctgggctacaccgaagatgacgtagtatctaccgatttcaacggcgaagtttgcacttccgtgttcgatgctaaagctggtatcgctctgaacgacaacttcgtgaaactggtatcctggtacgacaacgaaaccggttactccaacaaagttctggacctgatcgctcacatctccaaataagttgagatgacactgtgatctaaaaagagcgacttcggtcgctcttttttttacctgataaaatgaagttaaaggactgcgtcatgattaagaaaatttttgcccttccggtcatcgaacaaatctcccctgtcctctcccgtcgtaaactggatgaactggacctcattgtggtcgatcatccccaggtaaaagcctcttttgcattacagggcgcacaccttctcagctggaaacctgcgggtgaagaagaagttctgtggttgagcaacaacacaccgttcaaaaatggcgtcgctattcgcggtggcgtaccggtttgctggccgtggtttggtccggcggcacaacaaggtctgcctgcgcacggttttgcccgcaacctgccgtggacgctgaaaagtcatcatgaagatgctgatggcgtagcgctgacttttgaattgacgcaaagcgaagagacgaaaaaattctggccgcacgactttacgctgttagcgcatttccgcgtgggtaaaacttgtgaaatcgatcttgaaagtcatggcgaatttgaaaccacctctgccctgcatacctactttaacgtgggtgatatcgctaaggtaagcgtcagtgggctgggcgatcgcttcattgataaagtgaatgacgcgaaagaaaatgtactgaccgatggtattcagaccttccctgaccgtaccgatcgcgtgtatctgaatccacaagattgcagcgtgattaatgatgaagcgctgaatcgtattatcgccgtaggccaccagcatcatctgaacgttgtcggctggaacccgggaccggcgcttagtattagcatgggcgatatgccggatgatggctacaaaacatttgtttgtgtagaaacggcttacgctagtgaaacgcaaaaagtgaccaaagagaaacctgcacatctggcgcaatccattcgcgttgcgaaacgttaatttacgttaatgttgtgtgccgggtgcaatgcatccggcacacaacatcacaccatatccagcgcagtttttccttttggtgccggatatgccttatccagcatagctaattccgcactagaaagttcgacctcaagcacagccgcattttgttggacatgggcaatcgtggccgcttttggaatcgccatcacaccctgatgactgatcacccacgccaacaatacttgtgccgcgctgatattgtgagcatgtgcaatttcgttgactaccgcgttttttaacagtccattgcgcaaccgcccggcctgggctaacggactgtaagccatcaccggcatctgctgttgctggcaccaggggagtagatcgtactcaattcctcgactaccgagatggtaaagcacctgattagtggcacactgatttccccccggcagctgccagagttcctgcatatcagcataatcaaggttagaaacgccccagcggcggatttttccctgggcgatcaatttttccatcgctgcgacagtctcttcaaaagcgaaactgccagaccagtgtaataagtaaagatcgagataatcagtattgagacggcgtaaactggcttcgcatgcatttatcgctttttgcccgccagcattccacggatagactttagagacgagaaagaccttctctcgcagaccggttaatgcttccccaaccaccttttcggcaccgccatcggcatacatttcggcggtatcaatgagggttaaaccgagttcaatgcccgcgcgtagtgcagcaacttctgttttgcgctgactggcatcttcgcccatataccatgttccctgccctacggctggcagactgacatcgccactaaattgaatcattttttgttgcattgtttcctcccaggtattgcaccaccgtaatgcaaaacagggcgtgacgccctgtttttatgcacaaaatgccctggaaagatgcattatcagaatttgtaggtgatcccggtagaaatcaggccagtccaggatttatccaccatcgggctgtcagtaacttcatcagacagacgggtgtagcgtgcggtaccgtaaacactccagtcgccgaggaagttgtagctggcgctcagctccaggtaagggctccagctgtcgttcgggttatagccacgcagaccgctgcgagcggactctttgcggcttacgccataatagtattcgttctggttttcgctgttccactgcacaccaatacccggagtcacggtcaggccaccgttggtgtaacgatacaaccaggccatatcccagacgatgccgttgctgttatccagggtatcgccagccagggtggtacgcaggtaaccgtactgggtaaagtgagcataagacagaccagccatcatggtgctcttacggtcatccaggtgacgcatttggtgatcgccactgtctttcgctttgaagtaaagcgggctccagtaagcggtaatactaagtttatccgttgcgtcattccacaggtagtaaccaccacctaagccacggaaccagaagttatcgccttcatagttgattaccggtactgggtaaacatcggtatcgtaatctttatatgggtgttcaacgacacctacgcctgcgcccagggaaaatttaccttcagcgtgcgctacgcctgcagacgttgcgataagcactccaagtgccagaagtttgagtttggtcacaattaatcattccttaaacaaatgtttagcgggcgacaaagtttacccgtcaatacatcgaaacccaacctttttacgttttcattttttaaagtaactgtttaattttcctgacgcggatgacaccgcgcttacagccaaatgaatttagcgttactggcgagcctggtctttacattaattatgcaaaatttatggatgagttgttgatatgccattgaaattaagaaagccgtgcaggcaagttttccatttgccatctacgcttaattttgaaggtgtatcaccgggcacgttgttctcatcgtcgataaaatggcatgagagttgctgtgttttagcaagagacgtcgttcagtttacctcttccgggagcctctactattcatatgaacggctcttaacctgtgctaaaaaacgaaaggacggcataccatgaatatattcgatcactatcgccagcgatatgaagctgccaaggacgaagagttcacactgcaggagtttcttaccacttgtcggcaagatcgcagtgcttatgccaacgcggctgagcggctattgatggctatcggtgagcctgtcatggtcgatacagcccaggaacccagactttctcgactcttttctaaccgggtcattgcacgttatccggcgtttgaagagttttacggcatggaagacgcgattgaacagattgtctcttatctgaaacacgcggctcaggggctggaagagaagaaacaaatcctgtatctgctggggcctgtgggtgggggtaaaagtagccttgctgagcgactgaaaagtttaatgcagctcgtaccgatttatgtattgagcgcgaacggtgagcgtagcccggtcaacgatcatccgttctgtcttttcaatccgcaggaagatgcgcagattctggaaaaagagtatggcattcctcgccgttatctcggcaccatcatgagcccgtgggcggcaaaacgcctgcatgaatttggtggcgatatcactaagttccgggtagtgaaggtctggccgagtattctgcaacaaattgctatcgccaaaacggaacccggcgatgagaacaaccaggacatctccgcgctggttgggaaagtcgatattcgtaaactcgaacactacgcgcagaatgacccggacgcctacggctattccggtgcgctgtgccgcgccaatcaggggatcatggaattcgttgagatgtttaaagcaccgattaaagtgctgcatcccttgttaaccgccactcaggaaggtaactacaacgggacggaaggtatctccgccctgccgttcaacgggattattctcgcacacagcaacgagtccgaatgggtcactttccgtaataacaaaaacaacgaagccttcctcgatcgtgtttacatcgtgaaggtgccgtattgcttgcgcatttccgaagagatcaaaatctacgagaaattgcttaatcacagtgaattgactcacgccccatgcgcccctggcacgctcgaaacactgagtcgtttttccattcttagccgcctgaaagagccagaaaactccagcatttatagtaagatgcgggtttatgatggcgaaagtctgaaagacaccgatcccaaagccaagagctatcaggaatatcgtgactacgccggtgtcgatgaagggatgaacggtctgagcacgcgttttgcgtttaagatcctctcccgcgtgttcaacttcgatcatgtagaagtggcagcaaacccggtccatctgttctacgtcctggaacagcagattgagcgcgagcagttcccacaagagcaggcagaacgctatctggagttcctgaaaggttatctgatcccgaaatatgccgagtttatcggcaaagagatccagacggcctaccttgaatcctattccgaatatgggcaaaacattttcgaccgttatgttacctacgcggatttctggattcaggatcaggagtatcgcgatccggataccgggcagctgtttgaccgcgagtctcttaacgccgagctggagaaaatcgagaaaccggcggggatcagtaatccaaaagatttccgcaacgagattgttaacttcgtactgcgcgccagagcgaataacagcggacgcaatccgaactggaccagctatgaaaaactgcgcacggtcatcgagaagaaaatgttctccaataccgaggagctgttgccggttatcagctttaacgccaaaacgagtaccgacgagcagaagaaacacgacgactttgtcgaccgtatgatggaaaaaggctacacccgtaaacaggtgcgtttactgtgcgaatggtatttgcgcgtacgtaaaagctcttaacaaccctggcccggtacacatgttaccgggcctacaacgacagcgaaccgtgggcctgagaagcggcaacacaggcgtagcatacagttggcaaatgtagtacggggggcatatgacctggtttattgaccggcgtctgaacggcaaaaacaaaagcatggtgaatcgccagcgttttttacgccgttataaagcgcaaattaaacagagcatctccgaggccattaataagcgtagcgtgactgacgtcgacagcggcgaatccgtatccattcccacggaagatattagcgaaccgatgtttcatcaggggcgtggcggtctgcgccaccgcgtgcatccgggcaatgaccatttcgtccagaacgaccgaattgaacgtccccagggtggcggcggaggttccggcagtggtcagggccaggccagccaggatggtgaaggtcaggatgaatttgtctttcagattagcaaagatgagtatcttgatctgctctttgaagatttggccttaccgaatctgaaacaaaaccaacaacgccagctgaccgaatataaaacgcatcgggcgggttataccgctaacggcgttccggccaatatcagcgttgtgcgtagtttgcagaacagtctggcgcgacgcacagccatgacggcaggcaagcggcgggaacttcatgcactggaagagaatttggccatcatcagcaacagtgaacctgcgcaactgctggaagaggaacgtctgcgcaaagaaattgcagaattacgtgccaaaattgaacgcgtcccttttattgacaccttcgatttacgttacaagaactacgagaagcggcccgatccctccagccaggcagtgatgttttgcctgatggacgtttccggtagtatggatcaatccactaaagatatggctaagcgtttttatattctgctgtatctgttcctcagcagaacgtataagaacgtggaagtcgtatacatccgccatcatacccaggcgaaagaagtcgatgaacatgagtttttctacagccaggaaacaggcggcaccattgtttccagcgccctgaaactgatggatgaggtagtgaaagagcgttataacccggcacagtggaatatttacgctgcacaagcaagcgacggcgataactgggccgatgactctccgctttgccatgaaatcctggcgaaaaaattattacctgttgttcgttattacagctatatcgaaattacccgtcgtgcacatcagacattgtggcgagaatatgagcatctgcaatctactttcgacaactttgcgatgcagcacatccgcgaccaggatgatatttatccggtgttccgtgaactgtttcataaacaaaatgcaacagctaaaggctaaaactatcagccaggtcattatcgcctggctgatttttagcttactgtaaattatctcatttattacatacattagcttacaatcgctttaaatatgacagcataacctttacataatttagttccagaaaacaatcattcggaaaaatgattcagagtacacgtatttccatggggttattctttaaatattttttaagcttaacgaaaattgatcctggtcaaaactatatatctctgccaagtataaaatccagcactcacattgctctcctttttatggtttctatgggtacacaaaaattaaaagctcaaagcttttttattttcagtttattgctgacgttaattttattttgcattactaccttatataacgaaaacacaaatgtaaaactcatcccacagatgaattacctgatggttgttgtggctttgtttttccttaacgccgtcatttttcttttcatgttaatgaaatatttcactaacaaacaaattttaccaacactcattttaagccttgcatttttaagtggccttatctatttagttgaaaccattgtaattatccataaaccaattaacggcagtacactgatccagacaaagagcaatgatgtttctattttctatattttccgccaactcagttttatttgtttaaccagcctggcgctcttttgttatggaaaagacaacatccttgacaacaataagaaaaaaacgggaatcctgttgctggcgctgatcccttttttagtttttccccttctggcacacaatctgagcagttataacgctgactattctttgtatgtcgtcgattactgtccggacaaccatactgcgacctggggaatcaactatacaaaaatattggtttgtctgtgggcatttttactgttctttattatcatgcgcacacgattagccagcgaactatggccgttaatagcattattatgtctggcaagcctatgctgcaacttacttctactgactctggatgagtataattatactatctggtatatcagtcgcgggattgaagtttccagtaaactgtttgttgtgtcttttctgatttataacattttcaggagctgcaactctccagcaaactggcagttcatgatgtgctgaccaatatttataatcggcgctactttttcaacagcgtagagagtttattgagccgacctgttgttaaggacttctgtgtcatgctggttgatattaatcagttcaaacgcatcaatgcccaatggggacatcgtgtgggtgataaagtgctggttagtattgtcgatattatccagcaaagcatccgccccgatgatattttagcgcgactggagggtgaggtgtttggcttgctatttaccgaactcaatagtgcccaggcaaaaatcattgcggaacgtatgcgtaaaaatgtcgaactcctgaccggctttagtaacagatatgatgttcctgaacaaatgaccatcagtattggcacggtttttagtacgggtgacacgcgtaatatcagccttgtcatgacggaagcagataaagccttacgcgaagcgaaaagcgaggggggcaacaaagtgattattcatcatatttaagtgcaaaaatattcagagccatgctttttgcgtggcttttgcatacaatttattactattacccctaaatttcccctccccagcggcgcagagatgagtataattagcgcccctgtgccaggccgcaatcgaactttatctggttttctcgtttcactaaccgaaggagatgcgtataaagcttccgatgagcgtttatatgtcaataagcagaacaaaaacagccgttcatgataaccttctgtggttgtttgcttgtaatctcaggagcgtgaaatgactgaaatggctaaaggaagcgtgacgcatcagcggttaatcgctttattaagtcaagaaggtgctgacttccgcgtcgttacccatgaagcggtaggtaaatgtgaagcggtgagtgaaattcgtggcaccgctctaggccagggtgctaaggcactggtatgtaaagtcaaaggcaatggcgtaaatcaacatgttctggcgatcctcgcagccgatcaacaggccgatctgagccaactcgccagccatataggcggattacgcgctagcttggccagcccggcggaagtcgatgaactcacaggctgtgtcttcggcgcgatcccccctttcagcttccatccaaaactcaaactggttgccgaccctctactcttcgaacgatttgatgaaatcgccttcaatgcaggcatgctggataaatccgttattttgaaaaccgcggattatttgcgcattgcgcaaccagaactggtcaatttccgccgcactgcgtaattagccggtccgttcgataagaagaacggacaaaaccagtacaacagcaatggcaaaaaagctactcgtgataatcagtgtctcgacaaacatttgatcgttcatagcatgcccccgggagatagctgttttcacgttattgttagcgtgcacaaatggcagtttgatgacagttcgcctgattttttatgcaaaaaacgtaaagattttctacttccttcctgcagcaagcgtaaagtaagcaggcttattattttttggcaaggaaaccacgatgtttgatgtcactttgctgatcctgctcgggttagctgcgctgggctttatcagtcataacaccactgtcgccgttagtattctggtgttaatcattgtccgcgtcacaccgttaagcaccttttttccgtggattgaaaaacaggggctaagtatcgggataatcattctgacgattggcgttatggcccccatcgccagcgggacgctaccgcccagtaccttgattcacagctttctgaactggaaaagtctggtggcgattgcagtaggcgtgattgtctcctggctgggtgggcgcggcgtgacgttaatgggcagccagccgcaactggtcgccgggctgctggtaggcactgttttaggcgtagcgctgtttcgcggcgtaccggttgggccgcttattgccgcgggtctggttagcctgattgtggggaaacagtaattattgccgcgggtctggtttcgcactttgtggggaaacagtagttaatctcgcaatatatcggcctggcgtttgccccaggcctttcttaaacatagtaataaaggccgttgtactatcataccccagcgtatgagcaactttctgtacagtatcgcctttcactaatccctgaagcgccataatcagctgtaactgctgacgccactggcgaaaactcaaccccgtctcttttactatcagtcgggcaagattgcgttcactcatcgcaaaaaagccagcccattgccccaatgccccccactcgacaggccctttcgccatcatctccaccatcgtgcggattttaggatgagaagaaacgggcaggtgcagctgttgttgtggctgctgagggagttcatcaaacaggacctgaattaatctgcgggtcattggctcagcacgctgagtcgtcgtcctgtttgccagggttaaaattaattcccggcataaggggcttattttcaatgtgcaacatgttgtcggcattgtcactgcgctgggttcgataaacagaaaacagagttcagcattagctgttacttgattgctatgttccaccccgcccggtatccaaaccgcatattgtggcggcaccatccacaaagcattttccaccgtacaggtaattgcaccatgtagcgccagtatcagctgtcctttgcggtgctgatgtacaggactggttaactcatccgttccggcgtgaatacaaaatgcgaccgcggcttcatggtgtcggtcgggttcatagccattgagattcaacctgtgcatcattttgtccgaacttagcgataatttgtcattttagcttgattcaacataacaataaaaacggtaaggtacagcctcgtttgtaacaatgagaagcatatgacctgtagtactagtttaagcggcaaaaacaggattgtccttatcgctggcattctgatgattgccacaacattacgcgtcacctttaccggcgcagcaccgttactggatacgattcgttccgcttacagcctgacgacagcgcaaaccggcttattgaccaccctgccattattggcctttgcgctaatcagtcctttggctgccccggtagcgcgacgttttggtatggaacgtagcctgtttgccgcgttacttttgatctgtgctggtatcgcaattcgctctctccctagcccttacttattatttggcggtacagcggtcattggcggtgggattgcattaggcaatgtcttactgccaggattaattaaacgcgatttccctcattccgtcgccagacttaccggcgcatattccctgacaatgggagctgcagcggcactgggaagcgctatggtcgtgccgctggctttgaacggttttggctggcaaggcgcgttgctcatgctgatgtgttttcctctgctggctctttttttatggctgccacagtggcgaagtcaacaacatgcaaatttgagtaccagccgcgccttacatactcggggtatctggcgtagtccgcttgcctggcaggtcacattgtttcttgggatcaacagtctggtctattacgtgattattggctggcttccggcgatcctcatcagtcacggctatagcgaagcacaggcgggtagtctgcatggtttgctgcaactagccacagcagcacccggtttgctgatcccacttttcttacatcatgtgaaagatcagcgtggtattgcagcgttcgttgccttgatgtgcgcagtgggcgcggttgggctctgctttatgccagcgcacgcgatcacctggactctgcttttcggttttggttccggcgcaacaatgatactggggttgacgttcattggtctgcgggctagttctgcgcatcaggcggcggcactcagcgggatggcacaatccgtcgggtatttgttggcagcctgtgggccgccgctgatgggtaaaatacacgatgctaacggtaactggtctgtaccacttatgggtgttgccatacttagtctactgatggcgattttcggactttgcgccgggagagacaaagaaattcgctaatatccggtgctatagtgacgtaacaaatcatgcgtgaaagggagaacaaacacgatgaatattcagtgcaaacgcgtttatgatccggctgaacagagcgatggttatcgcatactggtcgaccgcctctggccgcgcggtatcaaaaaaaccgatttagcccttgatgagtgggataaagaaatcacgccgagtacggaactgcgcaaagcctttcacggcgaagtcgtcgattatgcaacctttcgcgagcaatatcttgcagaactggcgcaacacgagcaagaaggaaagcggctggcggacatcgccaaaaaacagccgctgaccctgctctacagtgcaaaaaacaccacgcagaaccatgcgctggtgctggccgactggctacgtagcttgtgattttagtacagcatccggcggttatttttcaccagccggatggtcacgccgccacaatgcccattcatcaatcgtttcaccgcccggtaatttgcaattgttgctgaccccttgcgctgtctgcactggaatgagcgtcccgcccttctgctggcaatagacgctcgccggatttgccataccaatctgcggcggtttaggtgcttctggctgagaaggggtactacaaccagccaggaccagcaagcaaggcagaacaaaactgataattttcatttattgatctcacatatttatccaagattagagtatcgcggtatcgttttgttttgcagcactatttttattacattcactcaaaacatattacgtcttgtttcatctttgttgatgatgttttatcatgcctgcaaagattaaataatcagcatttacccgccgtatcctggagttgttccgtgagtgatcagattatcgcccgcgtcagccaatcccttgccaaagaacagagtctggaaagtctggtccgacagcttctggagatgctggaaatggtcactgatatggaaagtacctacctgaccaaagtggatgtcgaagcgcgcctgcagcatattatgtttgcccgtaacagccagaaaatgtacatcccggagaattttaccgtcagctgggattacagcttatgcaaacgcgccattgatgaaaactgctttttcagcgatgaagtccccgaccgttggggtgactgtattgcggcacgcaatcttggcatcaccacatttctgagcacgccaattcacttaccggatggaagtttctatggcacgctttgcgccgccagcagtgagaagcgccagtggagtgaacgcgcggaacaggttttacagttattcgccggactgattgcacaatatattcaaaaagaggcactggttgaacagctgcgcgaagccaatgctgcgctgattgcgcaaagctataccgacagcttaaccgggctaccgaatcggcgggcgatttttgaaaatctgacgacactgttttccctcgcccggcatcttaaccataagataatgatcgcgtttatcgatctggataacttcaaattaatcaatgatcgttttggtcataatagtggcgatctgtttctcattcaggttggcgagcgccttaatacgctccagcaaaatggcgaagttattggtcgtctcggcggtgatgagtttttagttgttagtctaaacaacgagaatgcggatattagcagcctgcgagaacgcattcagcagcaaatacgtggagaatatcacttaggtgatgttgatttgtattatcccggtgccagtcttggcatagtagaagtcgatcctgaaacaaccgatgcagacagtgccctgcatgctgccgatattgcgatgtatcaggagaaaaaacacaaacagaaaacaccttttgtcgcgcatccagcgctacattcctgaggcgtattcacatccttttgattggtgataacatgcgaatcggtattatttttccggttgtaatcttcattacagcggtcgtatttttagcatggttttttattggcggctatgctgccccgggagcataaagatgaaaaaaacaacgattattatgatgggtgtggcgattattgtcgtactcggcactgagctgggatggtggtaacgtcacctctaaaaaatagcaaaggctgcctgtgtgcagcctttgtgcaatttaagcgttaacttttaatcttcctgtagataaatagcacgacaatcgcaccaataacggcaaccacgaagctgccaaaattgaagccatcgactttaccaaagccaaacagcgtgctgatccatccgccgactacggcaccgactatccccagcaggatagtcataaagaatccacctccatctttacctggcatgatccacttcgccagaataccggcaataagcccaaaaataatccaactcagaatgcccattgtttcctcacttatctgttttgcattagcgggttagtcgctgataaaaagcatagcacaacatcgggagggcaagatttgtgacgagcatcacggaggttttttttgcgatggcgcagaaattgcgccatcaacgatcagtgataattaccaaccacaaacatcatgttcgttttccgtgtcataagaacgtacggtattcaccagatcttttatcacttcagccgccacttctggcaccagcaaagtcatcggcgtctctgtttcataatcgacagaaacgccattgctgttattggtgacggtcacggtatacgttgctttgcccatgattcatttcccgttatgaatgactttccgttgttgcgcaccttccatcaggacttcaggagccacgaagaagtcaatgttgaaataagtatcgtcagtcatggcttcaatgttgtgccacttttctggagggaacaccgcaaactgccccgcttcgataaggatcacctgatcaggctctgcactgtgttcatcagcgtagccgagatatttgaccgccccatgcataacggaaaggcgtgggtaaacccccgggcgcgttcctttatcaagatgacgttcgaatattccggcaggtgcagtttgtttattccagaaaggcgtactgcgcgtatgaatataattctgtgggatttgaagcatccttttccctccttcggtgaatgcgctgaaaacggtttattccagccgtttcagggtacgcctgataatttgcattttaaataccatttattggttactttttagcaccatatcagcgaagaatcagggaggattatagatgggaagcccgcgacaacgcgggctgaaagcatcaggattgcagcgtcgccagtcgggcagcgaaacccacgaacatcaaaccaatcagactgttgccaactttagccagtttctttttggtacgtatgtactgcgtgacaaaagcaccagatataatcaggaagctcaaatagcagaaactcaccagttccagcgtcgccgccagaataaagaaactaattcccgtatgtggggcattaacatcgataaactgtacgaaaaagctcacatagaacaaaatggctttcggattagtcaggctcaaaattaacgcgcgtttaaaaatagcaccgtattggggctcatcggatttggcctcgctatttttacccttcagggtcgcgtaaagaattttactccccagatagagcaaataaaacgcaccaagataacgtacaatgttgaataatatcggggtggtcttaattaatgtcgccactccagcccatgccagaaacatcaataccgcatcgccaataaatacaccgcaggccgcaagataaccgcctttcataccgctactgacgctatttttgagtacaaacagggtatttggccctggcaccaacacaataaaaatggccccaaccagataggtccagtaattcagaaccccgtattcagcgaacacattaacctctttaattatctttcgatcatgcgcgattaaaggtgaatatgctaaccaatctgtagcggcttagaaaggagaaaatcaggttttaacctgatatcaacccgataattgaatcattaatcaggcatgctccagactaaaattcgggtagtgctcggcaaaatactggcgtaaaaattctaccgttatccgcactttcgcactcgtcgccagcctactaacataaacggcccagacgttcgctggctggtaatattccggtagcacttgcactaaatgaccactggcaatgttttcgctaacatcccaccaggaacgcagagcaatcccctgcccatcgagacaccactgatggacaatttctccatgattagagctcagtgggccggtgactttaatcgcatgggggccttctttattgcgtaattgccagacaccaaaaggatgatcgcgctctttaatgaccaggcacggcaatgcagaaagatcggttaaatgtttcggcgcgccatgttgcgcaataaattccgggctcgcgcagagaatacggtaattggtcgccagtttgcgggcgattaaattaggggcgatgtcatcgccaatgcgaatatcgagatcgacaccttcattgaccaaatcgaccagtcggtcttccacatcaaaacgtaattccagttgcggatacgccttcgccagcgctaataacgccggagccaccacctgtcgtccaaaaccaaagctgctgataatacgcagcatcccctgcggcacctgacgcacgtcagaaagttcgtccatcatctgaccgacatcctgcaaaatccgctgcgcccattcataaatccgctctccttcttcggtaatggtgacgcggcgggtggtgcggtgtaacaacaccacgtttagcgtttgctccagcaaggcgatgcgcttgctgacgaacgccggactaacgcccagttcttccgccacggcggcaaaaccagcccggcgagccaccagcataaagacgcgcaaatcattcagcagcggtaaattattcatgattcgtgttttatgtttcaccagttacggggattaattccttttcagtcaattataggatggtgatgttgtcaattttgatggtcaggaagtgagaacccaatgatgaaaacgatgcgtattgctgcgatcccgggagacgggattggcaaagaagtccttcctgaagggattcgcgtgttacaggctgccgctgagcgctggggcttcgccttgagttttgagcaaatggagtgggcgagctgcgagtattacagccatcacggtaaaatgatgccggacgactggcatgagcaacttagccgtttcgacgccatctattttggtgccgtcggctggccggataccgttccggaccatattagcttgtggggtagcctgctgaaatttcgtcgtgaattcgaccagtacgtcaacctgcgcccggttcgtctctttcctggcgttccctgcccgctggcgggaaaacagcctggcgacatcgatttttacgtggtcagggaaaacaccgaaggcgaatattccagcctcggcggtagagtgaatgaaggtacagagcatgaagtcgtcattcaggaaagcgtatttacccgccgtggtgtcgatcgcattttgcgttatgccttcgaacttgcgcaaagccgtccacgtaagacactaacttctgccactaaaagcaacggtttagccatcagcatgccgtactgggatgagcgagtggaagcaatggccgagaattacccggagatccgctgggacaagcagcatattgatattctctgcgcgcgttttgtgatgcagccggaacgattcgatgtggtggtggcgtccaatttgtttggcgatatcctttccgatcttggcccggcctgcaccggcaccattggcattgccccatccgccaacctgaatccggaacgcactttcccgagcctcttcgagcctgtccacggttccgcgccggatatctacgggaaaaatattgctaaccctatcgccacgatttgggccggggcaatgatgctcgattttctcggcaatggcgatgagcgtttccagcaagcgcataacggtattctggcagcaattgaagaagtgattgctcacgggccgaaaacacctgatatgaaaggcaatgccaccacgccacaggttgccgacgcgatttgcaaaattattttgcgttaaggtcaaaccagtttatttgaaccgcgtcactgacgcggtttttttattcgttctttgcagtaaataacctgcgtcatttcaccttttattgtttccgtttcgtgttttatggctttccgtattcttaattgtttaatttatgtaacatgcaaattttgttacgcgtacgttaggttccgccgtacaggtattggttttgctggcaatgggactggtgatttatttagccaccagtaaatacggcaatattcgtcttggcgaaggaaaaccggaatacagcacgctctcctggctgtttatgtttatttgtgccggtttaggttcttctacgctttattggggggttgctgaatgggcctattattatcaaacacctggattaaatatcgcaccgcgtagtcaacaggcactcgaatttagcgttccctactctttcttccactggggcatcagcgcctgggcaacttatacgctggccagtttaatcatggcttatcactttcatgtgcggaaaaacaaaggtctgagcctttccggcattattgctgctattaccggcgttcgcccgcaaggcccatggggaaaactggtcgatttgatgttcctgatcgccactgtcggcgcactgaccatttcccttgttgttaccgcagcaacctttacccgtgggctttccgcgctgaccggtttacccgataacttcaccgtgcaggcatttgtgatcctgctttccggcggcattttttgcctaagcagctggattggtatcaacaacggtttgcaacgtctgagcaaaatggttggctggggcgcgttcctgctgccattactggtgctgattgtcggcccaaccgaatttattaccaacagcatcatcaatgccatcggcctgaccacgcaaaacttcctgcaaatgagcttattcaccgatccgcttggcgatggtagttttacccgcaactggaccgttttctactggctgtggtggatcagttacacccctggcgtagcaatgtttgtcacccgcgtttcccgcggtcgtaagattaaagaagttatctggggactgatcctcggcagcaccgtcggttgctggttcttctttggcgtaatggaaagctatgccattcatcagtttatcaatggcgtaatcaacgtcccacaggtgctggaaacactgggcggcgaaacagctgtacagcaagttctgatgagcttgccagccggtaaattgttcctcgccgcatacctgggcgtgatgattattttccttgccagccatatggatgcagtggcctacaccatggcggcgaccagtacgcgtaatctccaggaaggtgacgatcctgaccgtgggctgcgtcttttctggtgcgtggtgatcactctgatcccgctttccatcttgtttaccggtgctagcctggaaacgatgaaaaccaccgtcgtgctcacagcccttcccttcctcgtcattttactggtgaaagtcggcgggtttattcgctggctgaaacaggattacgccgacattccggctcatcaagttgaacattatctcccgcagacaccggttgaagccctggaaaaaacgccagtgctccctgcgggaaccgtattcaaaggcgacaactgagcgccatcatcctaacgataaaggtatccctatgagcaatctgagccctgactttgtactacccgaaaatttttgcgctaacccgcaagaggcgtggaccattcctgcccgtttttataccgatcagaacgcgtttgaacacgaaaaagagaacgtcttcgccaaaagctggatttgcgtcgctcacagcagcgaactggcgaatgccaatgattatgtgacgcgtgagatcattggcgaaagcatcgtgctggtacgcggtcgtgataaggttttgcgcgcgttctataacgtgtgtccgcaccgtggtcatcagttgttgagcggtgaaggaaaagcaaaaaatgtgattacctgcccgtatcacgcatgggcattcaaactcgatggcaacctggcccatgcacgtaactgcgaaaacgtcgccaatttcgatagcgacaaagcgcaactggttccggtgcgtctggaagaatatgccggattcgtcttcatcaacatggaccccaacgccaccagcgtagaagatcaattacccggcctgggcgcgaaagtgctggaagcctgcccggaagtccacgatctgaaactggcggcccgctttaccacccgcacgcctgccaactggaagaacattgtcgataactatctcgagtgctatcactgtggtccggcgcatccaggtttctccgactccgtacaggttgatcgttactggcacaccatgcacggtaactggacgctgcaatacggtttcgccaaaccgtccgaacagagctttaaatttgaagagggtacggatgcggcattccacggtttctggctgtggccgtgcacgatgctgaacgtcaccccgatcaaagggatgatgacggtcatttatgaattcccggtggattctgaaactaccctgcaaaactacgatatttacttcaccaatgaagagttaaccgacgagcaaaaaagcctgattgagtggtatcgcgatgtgttccgtccggaagatttacgtctggttgaaagcgtacagaaagggctgaaaagccgtggctatcgtggtcaggggcgcatcatggccgacagtagcggtagtggcatttccgaacatggtatcgcccatttccataatctgctggcgcaggtgtttaaggactaatgacatcggcggcggtattttccgccgctgggctgatttttgatggagtacagcaatgagtgactatcaaatgtttgaagtacaggtgagccaggttgaaccccttaccgaacaggtgaaacgcttcacgctggtggcaaccgatggcaaaccattacctgcgtttaccggaggaagtcacgtcattgtgcagatgagcgatggtgataaccagtacagcaatgcgtatagtctactgagtagcccgcatgacacctcttgttatcagattgccgttcggctggaggaaaacagccgcggcggttcccgctttttgcatcagcaggtaaaagtgggcgatcggttaacgattagtacgcctaataacctgtttgcgctaattcccagtgccagaaagcatctgtttatcgcgggcggtattggtatcacccctttcctgagccacatggcagagctgcaacacagcgacgtcgactggcagctacattactgcagccgaaatccagaaagttgcgcatttcgtgatgagctagtccagcatccgcaggctgagaaagtccatttgcatcatagtagtaccggaacacgactggaattagcgcgattattggcggatatcgaacctggcacacacgtttatacctgtggccccgaggcgctaattgaagcggtaagaagtgaagctgcgcgtctggacatcgccgccgatacgctgcactttgagcaatttgctatcgaagacaaaaccggcgatgcatttaccctggtgcttgcccgttccggaaaagagtttgtggtgccggaagagatgactattttgcaggttattgaaaataataaagccgcgaaagtggaatgtttatgtcgtgaaggggtatgcggaacctgcgaaacagcaatactggaaggtgaagctgaccatcgggatcaatattttagcgatgaagagcgtgccagccagcaaagtatgttgatctgttgtagccgtgcgaagggtaaacgcctggtgttggatttgtaatttgccgaagccggatgtggcgctgagcgcgcccagtccggcttcggaagattttactgcggatattcctgcaataaattgtgtaatgcttccgccatcagctcaccacgccagccggaaatcagctccggcaaattgttctgcggtttcagtttccagtgccagttcagcagttggttgatttgccgacggcttgccagcaattcggcgctgatcttatgcgtttcgctcacgtcagtaatcaggctcttaatcgctttaaacgctttacgataacccggcatgtccatcaggttaagcatcggctgcggtaaggcatcttccggcaatgtctgcgctttttccaccagcgctagcagcgttttaccgtgaaagcggatttcgctaccggataaacccaggctgtccagttcgcctaaacttcccggcatataacgcgctacgctccacaaatgctcttcacgcacgacaaagttcaccgccagatcgcgctctcgcgccttgcgcagtcgccagtcggctaacagttgcagacaggccagttggcgtgtgcgtaattgccaggcattggtgatatcacgccaggcatcttccggcgcaacgacttcctgacgacgcatttgcatcaggcggcattcatccagcgccgcaggtagccagccggaggcctccgtttctaccataagcttggcggtgatcggtaacagataccagacatccgccgctgcgtattcacactgacgttcggtcagcggtctggccagccagtcggtgcggctttcactcttgtccagcgtaacgccggaatactcttccaccatggaagcgaaaccccaactcatcgggcgtccgcagaaggcagcaaggatttgcgtgtcaatcaagggttgtggtaattcgccaaagacattgaggaacacttccagatcttcactgcctgcatggagaaattttgtgatggacggatcgcgcaggatcgctttcagcggactccagtcggtgatcccgagtggatcgattagcgccagatgctcgccatcgaaaagttgaatcaaccccagctgcgggtaataagtgcgcgtacgaacaaattcagtatccagggctatcgccggaaaggcacggacggcttcacacaaagaagccagcgcatcgtccgtggtaatcatttggtaattcaaattgttttctctttagtgggcgtcaaaaaaaacgccggattaaccggcgtctgacgactgacttaacgctcaggctttattgtccactttgccgcgcgcttcgtcacgtaattctcgtcgcaaaatttttccgacgttagatttcggtaactcatcacgaaactccaccagcttcggtactttgtatcccgtgagctgacggcggcaaaaagtcaccagactctcttcggtaaggcttggatcttttttcactacgaagattttcaccgcttcaccactggagccggaaggtacgccaacagccgcgacttcctgtacgccaggatgctgcatgacgacatcttcaatctcgttgggatagacgttaaaaccggaaaccagaatcatgtcttttttacgatcgacaatgcgcaggaatccttcttcatccattaccgcgatgtcgccggtgtgtaaccagccatttttgatgatttcatcggtagcatcgggacgctgccagtaacccagcatcacctgcggtcctttgacacaaagctcacccggttgacctggtggtacttcattatcatcatcatccaccagtttggcttccgtgctcggcaccggcaaaccgatgctaccactatgataatcaatatcatatgggttaacgctgaccagcggcgcacactcggtaaggccatagccttccagcagatactgtccggtcagtttcacccaacgctctgccaccacttgctgcactggcatcccaccgcctgcggaaagatgcagactggagaaatccagctgctggaactctttattgttcagcaacgcattgaacaaggtgttaacgcccgtgatagcggtaaacggatatttcgctaactcttttaccaaccctggaatatcgcgcgggttagtgataagcaggttctgcccacccagttcgataaacagcaggcagttaatggtcagggcaaaaatgtgatacagcggcagcgccgtcaccaccagctctttgcccggatgcaacagcggaccataggtcgcgttaacctgttccaggttcgccagcatattgcggtgagtcagcatcgcgcctttcgccacaccagtggtgccgccggtgtattgcagaaaagctaaatcttccggcaccagttcgggtttgacgtactgcatccggtagccgttatgcagtgcgctacgaaaactaatggcatctggcagatggtatttcggcaccaaacgcttgatgtatttaacaacgaaattgactaccgtgccttttgccgtagatagctgatcgcccatacgggtcagaattacgtgctgaacggcggttttatcaaccactttttccagtgtgtgagcaaagttagacacgataacaatcgcgcttgcgccgctatcgttaagctgatgctcaagctcacgcggggtatacaacgggttaacgtttacgacgatcatcccggcacgcaaaatgccaaacagcgccaccggatattgcaataaattaggcatcatcaacgcaacgcgatcgcctttcttcagccccaacccttgttgcaaataagcggcaaacgcgcgactgcgttcttccagcttgcggaaggtcattacctcccccatattcacaaacgcaggttgatcggcgtagcgcgcgacgctctgctcaaacatatctaccagagattgataacggtcagggttgatctccgtcggaacgtccgcgggataacggttaagccaaaccttcttcaattcttcacctctaaaatgcgtgttcgtcgtcatcgcaaccccaaatgatatacatgccgttaacataatattaactcatcataccagcttgataattacccaacgaaaaggttgcgaagcgcgtcactatttatttttatctttaccgtaagaatgcagaaacagcggaccagccgctgtttctttttctttaaaaacaagcaattattcagttacaactgtttgtactctcgcggggccgggattataccagccccatccgccgtagccatagggccagccacgaccgccataaaaccatggatcaatcggctgaggcggcataatcacctgctgggttaaatgccaacgtttgtaacccgttacttgcatcaccataaatttatagggcgtattgccgattttgccgtcaaccgcaccagtgattggcccgactaccgtaaccagttgtccacggaaatccaccgggtccagaaaaccgttcacatcggcataaatgcgaccgcgagaaggttctcccagcgtcggtctggctccgctgtccagcggtacggtagcaatttccaggcgagttttcccttgctggttttgtaccgcaaccactttgccaccaaagcgtgcctcctgaccaacgtacagctgcggcgcactcatcacccgaactaaatcttgttgcggcgtgggactgctgcctttaatggcgtccggcacagtgacacaaccgctcagcattagcgcaaacgtacctgccagtatgcctttgataacattcttttgaaccgccatggtgcgactcctttttttctcagggcatactcttaagattcattctttgcccggaagtttcttccatgcgacgttgttacgtaaataaaccggttcggcatgttccaccgccaccgttttaccctcagcaaacatctgacacgcaatcggcagcatatcttcagcagcaggcagtaacacttcgccatcgcgcaaaaccagcccgctctctttaccgagatccggccaagcttgccagcccgtccctaccgtcacccattcgccggaaagctgttgcattcgttcatggacgatttcgggtttgagtacggcttcggtttcttcaccgtgccagataccgttttcatcacgctgatattcggcccagtaaacttcgcccattcgcgcgtcaatggctgccagcacgcgggttgcgccgtttttgcgccacgccccttgcgccatcgtcattagcgtggagacgccaatcatcggtaattccgcgccaagcgccagcccttgcgcgatgccaataccaatgcgcacgccagtaaagctaccggggccgcgcccgtaagccagagcgttaatatcagtcagggaagttccgctggtggtcaggatatcctgcaccatcggtaagattcgttgagtatgttcacgagggcaaagctcaaaatgagcgttgacagtaccgtcgttccacagggcgacagagcaggcctctgtcgcggtatcgatagccagaattcgcatgggtcttcgtgcttagatcaataaaaaggcgcgcatcataccatactccgtaacaaattacctggaggatggtatcgcaaggaaacgaaccgcacgggcaatgtcacgggtgcgtggcgcgggcggcagactggcgagaaacgtcgcgccgtaaggacgcatcaccagccgattgtcacaaatcaccagcacgccacgatcgtcggcgtcgcgaatcagtcgccctaccccctgtttgagagtaatgacggcatctggtagttgcacttcatcgaacgggtcgccaccgcgcaaacgacaatcttccatgcgcgcttttaacagtggatcatccgggctggtaaacggcaatttgtcgataattaccaaactcaatgtatcgccacgcacgtccaccccttcccagaaactgctggttgccacaagaagcgcattaccggcgctgacaaattgctgcaacagttgccctttgctggtttccccctgcaacaatacaggaagcgtcatggtagcgcggaactgctcggccagatcgcgcatcatggcgtggctggtacaaagcataaaacaacgaccgttgttagcttcgatgatcggtcgcagcattgccgctaactggcgagcagaacctggctggttggtttgcggcagattgcgcagcacacagagtaacgcctggcggctgtaatcaaatgggctgggcaacagcaagctctcggcctgttcgatgccaagccggctggtgaaatgatgcagatcgtcgttcacgctcagcgttgcactggtgaagatccagctaccgggtttttgcgccattaactctttgaatttatccgccacgctgagcggcgtgagagccagagtaaaatggcggctagtgcattcgtaccagtagctgtagcccggctgattgatctcttttagccgcttcagccgtgtgcgatacaacgtggcgcgctcaaatgccgcatccagcaaggcggaacgccccagactcagtttcgccacgtcataacaaagttccagggtgtcatcgagcagtaaaaatgcccgctgaatttgcggattagctaacagctcacgcaggttaccgcgataacctggctcaccgagttgcagacgaaaatcctgcgcactctgggcaagacgatcagcgcacttttgtaactgctgggtgtcttttaattcggtgcggtaggcgatggtgatgtcttttgccaggtcgagcagttgtcgactggagagactctgaccaaaatactggctggcaatgtccggtagctggtgggcttcgtcgaagatcatgacgtccgcttccgggatcagttcgccaaatccactctctttaaccaccatatccgccagaaagagatgatggtttaccaccaccacatcggcgtccatcgcttttttacgtgctttgaccacaaagcaatctttatacatcgggcagtcgctgccaagacagttgtcgttggtgctggtgaccagcggccacgcctgactatcttccgccacgctgacgcaggtgctgatatcaccatcgactgtttgattagaccaggagcgcagcaggatcacatcgcttaagatttgtaccggcagatcgccccccgccagcgcctgctgttcgagacgttcgaggcagaggtagttactgcgccctttcagcagcgccacgttgcccgtatatttcaatgccttactgactgttggcaaatcgcggctgtagagctgatcctgcaacgctttactgccggtgctgataatgactttctttttcgcccgcagcgcaggagccaggtaagcgtaggttttgcccgtaccggttcctgcttccaccaccagcggctggcctttttctatcgcctgggtgacggctaccgccatctgtcgctgtggttctcgcggcttaaagcctggtatcgctttcgccagctgaccgtctggtgcaaaatcgtccgtcacactaccccctgttgatttgaacagggattatgtcaggatgagggcgctttcgccagttgaagtggtgacggcgacctcacattgtggcagtctttgcagcacgaaaatggaagtataatgaggacaaaatgatgactatcgttcgtatcgatgctgaagcccgctggtctgatgtagtaatccacaacaacacgctctactacactggtgtaccggaaaacctcgacgccgatgcctttgagcaaaccgccaacacgctggcacagattgacgccgtgctggaaaaacagggcagcaataaaagcagcattctggatgccaccattttcctggccgataaaaacgacttcgcggcgatgaataaagcgtgggatgcttgggttgtcgcgggtcatgcgccggtgcgctgcacggtacaagcgggtttgatgaacccgaagtataaagttgaaattaagattgtggctgcggtgtaagctttatcgaagcaaaataagtcagacgataatttatcgataatactggtcggttttacataaatcgaccagagaataagatattactgttgatgcttctgctaattcattatttatatttataatttcaattttatctataaaactaactatataaataaacataaacatgccgttgtgttcgccctttgattagcaactctggttttctttcttagctgaacaatctggttatagcgtgcggactgaccgttaaatttctccatcttactggataacacaccatgagctgctacctttaaaacacctgaatgtcaacaggttaactcgtgccatatcgttataatccctttgatattagatgcaaattaaggtcatatatagccttatcgataacatggttaattttaaggataagaatatgcctgctgtaatagataaagccctggatttcattggtgccatggatgtaagtgcgccaacaccaagtagcatgaatgaaagcacggcgaagggaatctttaaatatttaaaagaactgggagtacccgcgagtgccgctgatattacggcgcgagctgaccaggaaggctggaaccctgggttcacggaaaaaatggttggatgggcaaaaaaaatggagacaggtgaacgttctgtgattaaaaatcctgaatactttagtacatatatgcaggaagaactaaaagcactggtctgagttaaatttatatcagcataaatgggtcaggacgcttttaatcacatataaaaagcgtcctttttctcacaatcaaatgatcatcggcttctataacgaaatcgatacggattagtgtgttactcgtcttcatcctcaaaacgcgccacgattcgctcgccggagtggttggcacgcagctcttctgccaccagcgcgattgcctggccgctgctcatcccttgtgccatcagttcctggatccgctcgacagctttttgctgctgttcatgggtgagactaggtaaacctgcaaacattgttaactcctgctaaattgttggcgctaattatttcatgctacccggcacatagccagtagagtcaggactgatgaagacgttatctcccgctgtgattactttactctggcgtcaggacgccgctgaattttatttctcccgcttaagccacctgccgtgggcgatgcttttacactccggctatgccgatcatccgtatagccgctttgatattgtggtcgccgagccgatttgcactttaaccactttcggtaaagaaaccgttgttagtgaaagcgaaaaacgcacaacgaccactgatgacccgctacaggtgctccagcaggtgctggatcgcgcagacattcgcccaacgcataacgaagatttgccatttcagggcggcgcactggggttgtttggctacgatctgggccgccgttttgagagtctgccagaaattgcggaacaagatatcgttctgccggatatggcagtgggtatctacgattgggcgctcattgtcgaccaccagcgtcatacagtttctttgctgagtcataatgatgtcaatgcccgtcgggcctggctggaaagccagcaattcagcccgcaggaagatttcacgctcacttccgactggcaatccaatatgacccgcgagcagtacggcgaaaaatttcgccaggtacaggaatatctgcacagcggtgattgctatcaggtgaatctcgcccaacgttttcatgcgacctattctggcgatgaatggcaggcattccttcagcttaatcaggccaaccgcgcgccatttagcgcttttttacgtcttgaacagggtgcaattttaagccttagcccagagcggtttattctttgtgataatagtgaaatccagacccgcccgattaaaggcacgctaccacgcctgcccgatcctcaggaagatagcaaacaagcagtaaaactggcgaacagtgcgaaagatcgtgccgaaaatctgatgattgtcgatttaatgcgtaatgatatcggtcgtgttgccgtagcaggtagcgtaaaagtaccagagctgttcgtggtggaacccttccctgccgtgcatcatctggtcagcaccataacggcgcaactaccagaacagttacacgccagcgatctgctgcgcgcagcttttcctggtggcagtataaccggggctccgaaagtacgggctatggaaattatcgacgaactggaaccgcagcgacgcaatgcctggtgcggcagcattggctatttgagcttttgcggcaacatggataccagtattactatccgcacgctgactgccattaacggacaaattttctgctctgcgggcggtggaattgtcgccgatagccaggaagaagcggaatatcaggaaacttttgataaagttaatcgtatcctgaagcaactggagaagtaagacgtggaataccgtagcctgacgcttgatgattttttaagccgctttcaacttttgcgcccgcaaattaaccgggaaaccctaaatcatcgtcaggctgctgtgttaatccccatcgtccgtcgaccgcaaccggggttgttgctgactcagcgtagcattcatctgcgtaaacacgctggacaagtggcattccctggaggtgcagtcgatgacacggacgcaagtgctatcgccgccgcgctgcgcgaagctgaagaagaggtcgctataccgccttccgccgttgaagttatcggcgtgctgccgcccgtcgatagcgtcactggctaccaggtaaccccagtggtcggcattatcccgcccgatctgccgtatcgcgccagtgaagatgaagtcagcgcggtgtttgaaatgccgctcgcccaggcattacatctgggtcgttatcaccctttagatatctaccgccgtggtgatagtcatcgggtatggctgtcctggtacgaacagtattttgtatggggaatgaccgcaggcataattcgtgagctggcgctgcaaattggtgtgaaaccctgactatacttatctttacatctacaaaacactacttgagacaatcatcgcaatattagttaaatcgcggtttttgattagtttaattcatgtgaatagttaagccagtcgccgcgttccctcttacactatgcgctgttattagttcgttactggaagtccagtcaccttgtcaggagtattatcgtgattagtctattcgacatgtttaaggtggggattggtcccagttcttcccataccgtagggcctatgaaggcaggtaaacagttcgtcgatgatctggtcgaaaaaggcttactggatagcgttactcgcgttgccgtggacgtttatggtagtctgagcctgacgggtaaaggccaccacaccgatatcgccattattatgggtcttgcaggtaacgaacctgccaccgtggatatcgacagtattcccggttttattcgcgacgtagaagagcgcgaacgtctgctgctggcacagggacggcatgaagtggatttcccgcgcgacaacgggatgcgttttcataacggcaacctgccgctgcatgaaaacggtatgcaaatccacgcctataacggcgatgaagtcgtctacagcaaaacttattattccatcggcggcggttttatcgtcgatgaagaacactttggtcaggatgctgccaacgaagtaagcgtgccgtatccgttcaaatctgccaccgaactgctcgcgtactgtaatgaaaccggctatagcctgtctggtctcgctatgcagaacgaactggcgctgcacagcaagaaagagatcgacgagtatttcgcgcatgtctggcaaaccatgcaggcatgtatcgatcgcgggatgaacaccgaaggtgtactgccaggcccgctgcgcgtgccacgtcgtgcgtctgccctgcgccggatgctggtttccagcgataaactgtctaacgatccgatgaatgtcattgactgggtaaacatgtttgcgctggcagttaacgaagaaaacgccgccggtggtcgtgtggtaactgcgccaaccaacggtgcctgcggtatcgttccggcagtgctggcttactatgaccactttattgaaagcgtcagcccggacatctatacccgttactttatggcagcgggcgcgattggtgcattgtataaaatgaacgcctctatttccggtgcggaagttggttgccagggcgaagtgggtgttgcctgtagtatggctgctgcgggtcttgcagaactgctgggcggtagcccggaacaggtttgcgtggcggcggaaattggcatggaacacaaccttggtttaacctgcgacccggttgcagggcaggttcaggtgccgtgcattgagcgtaatgccattgcctctgtgaaggcgattaacgccgcgcggatggctctgcgccgcaccagtgcaccgcgcgtcagcctggataaggtcatcgaaacgatgtacgaaaccggtaaggatatgaacgccaaataccgcgaaaccagtcgcggtggtctggcaatcaaagtccagtgtgactaatacttcttactcgcccatctgcaacggatgggcgaatttatacccgctttctcgtctgctgtaatattccccactacacttccactgttgcgtcaggcgtttgtcgccatacgcttacagggtggcccgcatgcaaaaagcacaacggatcattaaaacctatcgtcgtaatcgaatgattgtttgtacgatttgcgcactcgttacgctcgctagcaccctgagcgtgcgatttattagtcagcgtaacttaaatcaacaacgggtagtacaattcgccaatcacgctgtagaggaattagataaagtactgcttcccctacaggcaggtagcgaagtcttgcttccgctgattggtctgccctgctctgtcgcccatttgccattacgtaaacaggcggcaaaactccaaactgtgcgatccattggcctggtgcaagacggcacactttattgctccagcatttttggttatcgcaatgtgcccgtcgtggacattctggctgaacttcctgcaccgcaaccacttttacgcctgacgatcgaccgtgccctgattaaaggcagtccggttttgattcaatggacgcctgcagcgggcagtagcaatgctggggtcatggagatgattaacatcgacttactgacggcaatgctgcttgagccacaactgccgcaaatcagtagcgccagcctgacggtggacaaacggcatttgctctatggtaatgggctggtagattcccttccgcaacctgaagacaatgaaaactatcaggtttctagccaacgctttccttttaccattaacgttaatggtccgggggctacggcgctggcatggcactatcttccaacacaattaccgctggcggtgctgctaagtttactggtgggctacatcgcctggctggcgaccgcttaccgaatgagcttttcccgcgaaatcaatctgggcctggcgcaacatgagttcgaattgttctgtcagcctttgcttaatgcgcgcagccagcaatgtattggtgtagagattttgctgcgctggaacaatccgcgtcagggctggattagtccggatgtgtttattcctatcgcggaagaacatcatttaattgtgccactgacccgctatgtgatggcagaaaccattcgtcagcgccatgttttcccgatgagtagtcagtttcatgttggcattaacgtcgcacccagccattttcgccgtggtgtgctgataaaagatctcaatcagtactggtttagcgctcacccgattcagcaactgatcctcgaaatcaccgaacgcgatgccttactggatgttgattatcggattgcccgcgagctgcatcgtaaaaacgtcaaactggcgattgatgacttcggcaccggcaacagcagcttttcctggcttgaaacattacgtcctgacgtgctgaaaattgataagagttttaccgcagctataggttctgacgcggttaacagcacggtgaccgatatcatcatcgcgctggggcaaagactgaatattgaactggtggcggagggcgtggaaacgcaagaacaggcgaagtatttgcgccgtcatggcgtgcatattttgcaagggtatttgtacgcacagccgatgccgctacgtgattttcccaaatggctggcgggcagccaaccgccgcccgcccggcataatggacatatcacgcccattatgccgttacgttaacgcttactcatcttcatcgtgcgccggttgctctttaacaatgcgaaccagatcaacacgataatcattggcttcaatgatggtgatatgcagtggccctacatcaatcacatcgcccacacggggaatgtgaccatttgcgctgatcacgaggcccgcgaccgtcgcgatatcatcgtcatcggcaaggtgctcaacatcaagcgcctgctgcaaggcatgcaaatctgtaccgccttttaccagccagccgtcaccatcagtaatgatttccggcgtttcgtcagcgtccgggaattcacccgcaatggcttccagcacatccagcggcgtgaccagaccttgtaccacaccaaactcgttggtcacgataacaaagctcccgcgagcacgacgcagcacgcccaacaggttgatcggatcgagggtttccgggacgataatcgccggagacgcgctagcaatcgccgccacatcaacgccctcttccagcgccaccagcagttctttagcacgtacaataccgatgatttcatccagttcaccgcgacataccgggaacagactgtgcggactagagagcagttgctcgcggatttcatcgaccccgagattagcgtcaacccagcttatttcaccgcgcggcgtcatgatcccgcgcagagaacggctcgccagcgtcagtacgccgttaatcatgtaacgttcttcttcggcaaatgcaccttccgggatcggcatcggcatcgggttatcggcatcgtgctgaacattggcctgacgtttcccgcccatcaaacgcaggatggcatcggcagtacgcgctcgcagcggcaaagtgctctggtggcgaataaagttgcgacgcgcaatctggttaaacacttcgatgatgatgctgaagccaatcgcggcatacaggtaacctttcggaatgtggaaaccgaaaccttctgccaccagactcagaccaatcattaacaggaagctcagacagagcaccaccaccgtggggtgctggttaacgaatcgcgtcagcggtttggatgccagcaacataaccgccatcgcaatcactaccgccgccatcatcaccggcagatggttaaccatccctactgcagtaattaccgcatccaagctgaagacggcgtcaaggatgacaatctgtgtgacgaccacccagaaactggcgtagcctttaccgtggccggaatcatgatcgcggttttccagccgttcatgcagttcggttgttgctttgaacagcaagaatatccccccgaacaacataatcaggtcgcgtccggagaaggagaaatccatgacggtaaatagcggtttggtcagcgtgaccatccaactaatcaggctcagcagccccagacgcataatcagcgccagacttaaccccagcaaacgcgctttatcgcgttgttttggcggcagtttgtcagcaagaatggcgatgaagaccaggttatcgatacccagcacaatttcgagaacaacaagcgtgagtagccccgcccaaatactggggtccattaagaattccatgacaagctcctgcttaaggaatagctattcgacgccagaaataatgcaggcgtaacgacaaaatgcaaacgaaaggtgcggcatagagtgccagaaaggcaggcgttaaaaggcctgatgctgaaatgacgtcggtgacgatccatactgcgggctactgccctatactccatggttgttaaacgggagttaaacatatcagagacgcctctgatttggcaaagatttaccttcctttgcaaacgaatgtgacaaggatattttacctttcgaaatttctgctaatcgaaagttaaattacggatcttcatcacataaaataattttttcgatatctaaaataaatcgcgaaacgcaggggtttttggttgtagcccttatctgaatcgattcgattgtggacgacgattcaaaaatacatctggcacgttgaggtgttaacgataataaaggaggtagcaagtgaccattgctattgttataggcacacatggttgggctgcagagcagttgcttaaaacggcagaaatgctgttaggcgagcaggaaaacgtcggctggatcgatttcgttccaggtgaaaatgccgaaacgctgattgaaaagtacaacgctcagttggcaaaactcgacaccactaaaggcgtgctgtttctcgttgatacatggggaggcagcccgttcaatgctgccagccgcattgtcgtcgacaaagagcattatgaagtcattgcaggcgttaacattccaatgctcgtggaaacgttaatggcccgtgatgatgacccaagctttgatgaactggtggcactggcagtagaaacaggccgtgaaggcgtgaaagcactgaaagccaaaccggttgaaaaagccgcgccagcacccgctgccgcagcaccaaaagcggctccaactccggcaaaaccaatggggccaaacgactacatggttattggccttgcgcgtatcgacgaccgtctgattcacggtcaggtcgccacccgctggaccaaagaaaccaatgtctcccgtattattgttgttagtgatgaagtggctgcggataccgttcgtaagacactgctcacccaggttgcacctccgggcgtaacagcacacgtagttgatgttgccaaaatgattcgcgtctacaacaacccgaaatatgctggcgaacgcgtaatgctgttatttaccaacccaacagatgtagagcgtctcgttgaaggcggcgtgaaaatcacctctgttaacgtcggtggtatggcattccgtcagggtaaaacccaggtgaataacgcggttagcgttgatgaaaaagatatcgaggcgttcaagaaactgaatgcgcgcggtattgagctggaagtccgtaaggtttccaccgatccgaaactgaaaatgatggatctgatcagcaaaatcgataagtaacgtattgtgttgattatcactcagttttcacacttaagtcttacgtaaacaggagaagtacaatggagattaccactcttcaaattgtgctggtatttatcgtagcctgtatcgcaggtatgggaagtatcctcgatgaatttcagtttcaccgtccgctaatcgcgtgtaccctggtgggtatcgttcttggggatatgaaaaccggtattattatcggtggtacgctggaaatgatcgcgctgggctggatgaacatcggtgctgcagttgcgcctgacgccgctctggcttctatcatttctaccattctggttatcgcaggtcatcagagcattggtgcaggtatcgcactggcaatccctctggccgctgcgggccaggtactgaccatcatcgttcgtactattaccgttgctttccagcacgctgcggataaggctgctgataacggcaacctgacagcgatttcctggatccacgtttcttctctgttcctgcaagcaatgcgtgtggctattccggccgtcatcgttgcgctgtctgttggtaccagcgaagtacagaacatgctgaatgcgattccggaagtggtgaccaatggtctgaatatcgccggtggcatgatcgtggtggttggttatgcgatggttatcaacatgatgcgtgctggctacctgatgccgttcttctacctcggcttcgtaaccgcagcattcaccaactttaacctggttgctctgggtgtgattggtactgttatggcagtgctctacatccaacttagcccgaaatacaaccgcgtagccggtgcgcctgctcaggcagctggtaacaacgatctcgataacgaactggactaacaggtgagcgaaatggttgatacaactcaaactaccaccgagaaaaaactcactcaaagtgatattcgtggcgtcttcctgcgttctaacctcttccagggtagttggaacttcgaacgtatgcaggcactgggtttctgcttctctatggtaccggcaattcgtcgcctctaccctgagaacaacgaagctcgtaaacaagctattcgccgtcacctggagttctttaacacccagccgttcgtggctgcgccgattctcggcgtaaccctggcgctggaagaacagcgtgctaatggcgcagagatcgacgacggtgctatcaacggtatcaaagtcggtttgatggggccactggctggtgtaggcgacccgatcttctggggaaccgtacgtccggtatttgcagcactgggtgccggtatcgcgatgagcggcagcctgttaggtccgctgctgttcttcatcctgtttaacctggtgcgtctggcaacccgttactacggcgtagcgtatggttactccaaaggtatcgatatcgttaaagatatgggtggtggcttcctgcaaaaactgacggaaggggcgtctatcctcggcctgtttgtcatgggggcattggttaacaagtggacacatgtcaacatcccgctggttgtctctcgcattactgaccagacgggcaaagaacacgttactactgtccagactattctggaccagttaatgccaggcctggtaccactgctgctgacctttgcttgtatgtggctactgcgcaaaaaagttaacccgctgtggatcatcgttggcttcttcgtcatcggtatcgctggttacgcttgcggcctgctgggactgtaagactgttgtacactaccggggccttttggccccgtttttttatctggaggattaatgacaatcacggacctggtactgattcttttcatcgccgcactcctggccttcgcgatctacgatcagttcatcatgccccgccgtaacggccccaccctgctggcaattcctttgctccggcgtggtcgcatcgatagcgttatcttcgtcggattgattgtcattcttatctataacaacgtcacgaatcatggtgcgttaataacgacatggttattaagcgcactggctctgatgggtttttatatattctggatccgcgttccgaagatcatctttaaacaaaaaggttttttcttcgccaatgtctggattgaatatagccgaatcaaagcgatgaacttgagcgaagatggcgtgttggtgatgcaattagaacagcgtcggctgttaatccgcgttcgaaatatcgacgatctggaaaaaatttataagcttctcgttagtactcaataagttatgaatttagccaaagctatgtttagtgtatttttaataatcagacatagcttaggctatattacctcttcccttatttgttatttattttaacgtttcattgatatataaatccaaatgaaaatcgttatcaataaagcaatgaaataatatattccaacagttgttttatattctcaaaatatgttaaggttgcgccctcatttggggagtagccgatttccagattccggaaatgtacgtgtcaacatactcgttgcaaaacgtggcacgtacggactgaatactttcagtcaggcgagaccatatgcacatcaatcgctatgcctgcatgaacgcgaaaaccatcacggcttgttgttcatgtatgcatgtttgctgggggcgatgatgtgttttatggataccccggtcaggacattgtcatgaatatcactgctactgttcttcttgcgtttggtatgagcatggatgcatttgctgcaagtatcggtaaaggtgccaccctccataaaccgaaattttctgaagcattgcgaaccggccttatttttggtgccgtcgaaaccctgacgccgctgatcggctggggaatgggcatgttagccagccggtttgtccttgaatggaaccactggattgcgtttgtgctgctgatattcctcggcgggcgaatgattattgagggttttcgtggcgcagatgatgaagatgaagagccgcgccgtcgacacggtttctggctactggtaaccaccgcgattgccaccagcctggatgccatggctgtgggtgttggtcttgctttcctgcaggtcaacattatcgcgaccgcattggccattggttgtgcaaccttgattatgagtacattagggatgatggttggtcgctttatcggcagtattattgggaaaaaagcggaaattctcggcgggctggtgctgatcggcatcggcgtccagatcctctggacgcacttccacggttaataagaacgctgccagaggtgaatattaaagtccgtctggcagtcgaacacttcttttgctgccagtgtttgccagacttctggcttcgcacgccaggcaaacggcgtcatctgcaataatgcgacggcttcatcaccgcgaagacgcatcggataacacaactccgcactctgctgtaatgtaaaaccttccagttgttctgcatgaggtgcatgaagatgtacttcattgtaaatcagccccttcagctccatcaaatgtcgcggtcccggcgtggcagtaatgacccagccgccgggcttcactactcgtgctaattcttctgctttacacggcgcgtaaatacgtattatggcgtccatactggtatcggaaaacggcaaacggtggctggaagcgacacaaaaagtgacctgcggatagcgtttcgccgccgcttttatcgctaccttgctaacatccagaccaaacgtggtgatttcgggcaacgcatcggcaaatgcgtgtgtgtaatacccttcaccacagccaatatccagcaccgccgtggccttatcatcaagccgttccctcagttgggcgacaattgcatcacgcagcggctgataatgtccggcatctaagaatgcgcggcgtgcttgcatcatttccgcgctgtcgcccggatcacgagaccgtttatgctgaacgggcagcagattgacatacccttctttcgccatatcaaactgatgtcgctggggacagatatagctgtttttttcacggctaagaggctgatggcaaagtggacaggaaaaagacatgacaactccggcaggatactaaaggccgcaagtgtaacgcgaatcacgcggcgggcaaatatccgaacgccaggagcgaagataaagcatagtaaaaagcctcgcattcgacgaggctttatagcgagattgaagcgtattcacacttcagatcagtggattcgatcagatagctgttacgttaacagctgccggacctttctggccgtcctgaatttcgaactcaacgttctgaccttcagccagagttttgaagccattaccctggatagcggagaagtgtacgaacacatctttgctgccatcagccggagtaatgaagccaaaacctttagactcgttgaaccacttaacctgacctttaatctttgccatttgaaaaattccttagattgttttcttcgcccgcaggcataacatagataaaacactcacattactgcaactggcaccaatataaggctcggcagagaagcggtattcaacgtcaacgtgtttactcaggacttctttactgaaaatgccacacataaacagaactgtacctcgtttaacccgaaatctgttatcacatacaacgttaattatggcaagccatttttaaacatgtctcgatcagacgcacaaatctcgatacgtcttccactttttttgcacacttatgcaacggaatacgcgccgatatatcattgtgcttaaccttgccagttcaggcagatacttaaactggcgtattttctaacatagttcaataagttcagttgttccaggccagtgggagaagttattacatagtgcgtgcaatatcacattttttgctatgcaatgaataaaaagttatatcactttttctcataaaacagtcagttaacggctattaattaccctaaagagaagtcaatccccaaagggattgtaaatttaaaataagaaaaattgatgaatgagcaaaaaaatcaagagagaaacgtttcgctaataaataataccacgcttaatcacaaatccgatgtaaacatcctaataaattaatggggtaaatatctttttctgatatcccgttacgcaaataaataatatgataattatttgaagtcagaccagagttttaatttgaagcagttgcaccatgacagtgcgtataatcaggatgaattgagtaacccttcaacgacggggttactcaagattgaggaaggattatcgttcggcgaccagacgaataatatcttcgtcttcaacgcttttttgactctcaacggtctttttatctgctttctctggttcgtttgcttcgcacaaacgacgtaacagtgcattttgacgtttttgctgatccagcaacgcctcaagcagttcaatctgttcgttagtccgactactggcacgattgataaaaaaccacaagatgagcccgataagaagaaccaccacgcttacaaccaaagacgcaatgttcatcacgccactatttacaacttcgttcatttcaccacctctgagtagaggcgctattctaccactgctggagaggaagaaaatctagtgctgaaaaaatgatatcaccacgggataaactggttaatggcacaaattccgctgaaaaattgtacatcctgatcgcacatcatgttgaatacctgcgcccaaagcagcaagcaagccaacaccacgacaaccagaacgacccatcgaaactttttcactccaatctccgtttcacctaccttatgtcattaaactagcatgcgttagttaaacagcgcctaactatgtcgatattcgtgctttttcggaatgagtcgcttgcttcagcgcatattgccgctacgattaagcgaacataaaaagagaagaggttgtaatgcgattcatcattcgcacagttatgctgatagcactggtatggataggattattactcagcggatatggcgttttgattggaagcaaagagaatgccgcaggattaggtttgcaatgtacctatctgactgccagaggcaccagcacggtacaatacttgcacactaaaagtggttttttggggataacagattgcccgctgttacgcaaaagcaatatcgtggtcgataatggttaagggcaataaataaccagattctcactcctgagtaaaatactcttatagcaagcgcgtttaatataacgccaccttcaactttatttttctcatgctaaataaagaacctgtctgtttgatattccgacaggttcttactctcatcagaacggatagtcgtgataacccatttgggcagaaattttgcgcgctgcggtatgcaacattgcgacatattcctgtaaacgctcttcagagaaacgcaacgtcgggaaggagatgctcaaaccggcaatgaccacgccaaagcgatcaaataccggtaccgcaatgcatcgcagcccttcttcctgctcttcattatcttcgccatacccctgctcgcgcacctggtccagaacgggtaataacgcttctgtactggtgatggtccgctcggtactgcgtttatactccacgccctcaagaatttgcttcacttcatcgcgatcgcgccatgccagcagtaccttaccaatcgcggtgctgtacagcggattacgacgcccaatccgactatacatgcgcaaattgtacatagagtcaattttgtgaatgtaaacaatactgtcttcgtccagtgcgccgaggtggatagtttctttggtcaggcgggagagctcacgcatctggatatctgcgctacgaattaaatcgacgttttgtaacgcgcgagcgcccagttcaaacaatttcagggtcagggaatatttctcgctctccccttcctgcgccacataacctaaggttttcatggtctgtaaaaagcgataaacggtgcttttactcatcatgacgcgctggctcagctcggttatccctatttcgcgctcttcacccagcgcctgcaaaatgccaaaaacttttagcacggaagatacagaatcaggctgtttatccagatctgcgttagccatttatcacctcattgcgagtgttttataaaaatcagaactgttttttattataatttcgcaccagggtggtcgcaatccatcttttgccggttagttacaattctgcgacatccaccgtgaatatcagtgctagaatcatacccctgttgattattcaccaaagatataaaattcctatgccaaaagttcaggccgacggcctgccattgccccagcgatacggtgcgatattaaccattgtgattggtattagcatggccgtccttgacggcgcaatcgccaacgtcgccctgccaacaatcgccacggaccttcatgccacgccagccagttccatctgggtagtgaacgcctatcaaatcgccattgtcatctccctgctcagctttagctttctgggcgatatgtttggctatcgacgtatttataaatgcggtctggtcgtttttctgttgtctagtctgttctgcgccctttctgatagcctgcaaatgctcacccttgcgcgtgtcatacaaggtttcggcggtgcagcgttgatgagcgttaataccgcacttatccgcctgatctatccacaacgttttctgggtagagggatgggcataaacagctttattgttgccgtctcttctgctgccgggccgacaattgctgcagcaatcctctccatcgcatcctggaaatggttatttttaatcaacgtaccgttaggtattatcgccctgcttctggcgatgcgttttctgccacccaatggttctcgcgccagtaaaccccgtttcgacctgcccagcgccgtgatgaacgcgttaaccttcggcctgcttatcactgcgttgagtggtttcgctcaggggcaaagcctgacgttaattgctgcggaactggtggtaatggttgttgttggtattttctttattcgccgccagctttctcttcccgtaccgctgctaccggtggatttactgcgtatcccgctgtttagtctttctatttgcacatctgtttgctctttctgcgcacaaatgctggcaatggtttccctgcccttttacctgcaaaccgtgctcgggcgtagtgaagtcgaaacaggtttacttctgacaccgtggccgttagcaacgatggtgatggctccgctggcaggctatttgattgaacgcgtacatgcaggattgctgggggctttagggttgttcatcatggctgcggggcttttttccctggttctgctgcccgcgagtcctgcggatatcaatattatctggccgatgatcttatgtggtgctggatttggcttattccagagtcccaataaccacaccattattacctccgcgcctcgcgaacgtagcggtggagccagtggcatgttaggaacggctcgtctactgggtcagagtagcggcgcggcgctggtggcgctgatgctaaatcagtttggagataatggtacacacgtcagcctgatggctgcggctattctggcagtgattgctgcctgtgtcagtggtttacgtatcactcagccacgatccagggcataaaaaaagcgcgtcgatcaggacgcgctttttagtatttacttcatattacttcaggtattcacccgtacgcagagcttcaattcgtttatccagcggcgggtgggtcatgaacaactcactgaggcttttgctcttaccgttaatgcagagagccatcatgctggttgcttcttgcggttcatagctggttttcaggcgctgcagcgcggcaatcattttctcgcgaccaaccagttttgcgctaccggcatcagcatggaattcacgatgacggctgaaccacatggtgataatgctcgccagaataccaaacaccagttccagaaccgttgcaaccgcaaagtagatcagcgggttgccgttgctctcttcaccttcatcacgatttccgcccataaaacccgcggcaagctgcgccagaatacgggaaataaagataacgaaggtgttcaccacgccctgaatcagcgtcatggtgaccatatcaccattggcgatgtggctgatttcgtgagcaattaccgcctcggcttcatccgggctcatgttctgcagcaaaccggtgctgacagcaaccagagaggcatcacggcgcgcaccggttgcaaaagcgttgatgtccggcgcatggtagatagccacttgcggcatagcgatccccgcctgacgagcctgggttgctacagtattgaccagccaacgttccctttcgttacgcggttgctcgatcacttccccgccaacagatcgtaatgccatccatttggacatcagaaggctaacgaaggaaccaccaaaaccgaacagcaaggccatgatcatcagcccctgaacgctgctgctctgtatccctgtcaggctcagtaccagcccgaaaacgaccattacggccaggttcgttagcaggaagagcgcgattcgcatcataattttctttttacctcagtttaacaaaacgcaatatgcgatacccacatcgtatgggttacgcgactattttcaagtctggatagtgcgtaagtcaccagaaagacacaactttacattttgtagcatctgatttacggcatcttgtcgctgttaaaaaatcaggcacaatttcttgtgcctgattgatattacttgacgggagcgggttgttccgcgggtctggctttttcaagcttcgccagatcgagtgcgatattcaccgtctcatccagataaggatccggctcctggtaatctttcggtagatcatccagtttcttcaactccggtttaccttcgcgtttaaagcgttcgttcaaacgcgccagacgcgtcgcatcatcttcattattctctttctcacgcacagcgtaattcagagaaacgatattgcgcttgtccttcatagcgttgaagcgcgcgatatccttcatgatgttctggaactcaggatctttcgcgatacgcgcattatgttccttcagcagctccggttcaaaggccgttaaatctccacttttcacataagtcgcggcatcaatgctatcccacggcagcgcgttatcttcgaatttctcacccgtttccgtttcttcattacccgtcggcatgatgatgtctggcgttacgcctttacgttgcgtactgccgccgttaacgcgatagaatttctggatcgtgtactgcacagaacccagcgctggccattcaggacgtaacatctgatcgtaaatacggttcaaactacggtattgctgaacggtgcctttaccaaacgtcggttcacccacaaccagcgcacgaccgtaatcctgcattgccgcggcaaagatttcactagcgctagcactgaagcggtcaaccagcaccaccagcgggcctttatagaaaacctgtccgtcggtatcgctatcttcacgaaccttgccgttgttatcgcggacctgaacaatgggacccgcaggaataaacagaccggagaggcttacggcttcagttaacgccccaccgccattgctacgcaggtcgatgatgacgctgctgacattctgtttttccagtttctgcagttgcactttgacatcgtctgtcaaacccacatagaagcccggaatatccagcacgccgactttctctttaccgacggtcttcacgctcattttaaccgcgcggtcttcgagacgaatacgttcacgggtcaacgttacagtacgggtcttggtccctttaccagcaggtaaaatttccagacgaactttactgcccttcggccctttaattaaggcaaccacatcatcaagacgccagccaatcacgtcaaccatcggcttgcctgtttgaccaacaccgacaattttgtcaccaacgctgatagctttactcttcgctgccggaccacctgccaccatgctattgataacggtgtagtcatcatccatttgcagcactgcgccaataccttccaggctcaaactcatttcagtgttgaactgttcggtattacgcggggaaagatagttggtatgcgggtcgatttcacgcgcaaacgccgtcattgccaggctgaaaacatcttcgctgttggtttgcgccagacgacgaatggcaaatttgtagcggcgagtcagggtttcacgaatttctttatccgtttttcctgtcagcttcaggcttaactcgtcgaatttgactttactgtcccacagcgcgttcaactcagcctcgtttttcggccagggcgctttgctgcggtcaaggttataagtgtcgttgccggtgaaatccatcggcttttccagtacgctcaaagcgtactggtaacgctcaaaacggcgcttttgcgccagattgtagagatcgtagaaaacgtcgagtttgccactacgcagttcatcgcctaactcggttttctttttcgcgaactgttcaacatcgcttgccagcagcacgttgtggctgtaatcgagcagattcaggtagcggtcaaagattttggcgctaaatgcctgatcgaggtcgaactggcgataatgagaacgggtgaagcggctcgttacgcgctcacttaccgtcgcatgctgcgtctcttcctttaataccggaatttgatcagcacgcgtgatatcttctacagcgaaggtctggcctgctattgcaagcaggccagctaacgcggtaagcctaaaaaacatgttcatgcctggcccggcctccgtttcagaacaccaggtgttctgcgcgcacaatcaaagacataccgctattcagctggacgcggacgccgtctttggtgatttctaatacggtggcatccatcgcgttttgacccgctttcaccttcagggcttgtccgacagtcagagcactaatgtcagaaaccggggtgtgctgttcttcgcgaggtgcttttactgtttttggcgctttctctaccggcttttgcgcacgaggtttacgttcagcgccttctttgcggcgtggcgtagtcggacgtggcttgcgttcgcggcgcggtgcgtcttctttctcaccagcagttgcggcagcttcgcgttttttcgcttgctgttcagcacgctgtgcctgaacacgcgctttcgcttcttcaagctgcttgcgagcatgctctacatgttgctcgtccagctcaccgcatgggttgccgtcaagatcgacacgcgttgcgccgggtttaacaccgtaaagataacgccagctgctagtgtagagacgtaaagcggatcgcaattgcgttttgctcaggttcatttccccagcaacacgatcgaccaaatcctgaaaaataccgattttcagcggacgcgcttcaccttccgcactgaaacagtggggaaaacgttcggccagaaacgcgattacttctttactgctattcaacttaggttgattttccatgaaatttcctgattacaacggacgtagccaacaagcgcaggcatgaacaggcgtcattataatgacgctatcagtaaatgctacgttatccgttgattatcctgcgacgctcgcaaagaattttttgtaatccgtcgttgcaagcactttttcaagctgtgccacaagctgacgtaagccttgctcgtcctcgtctgtaaagcgaccgaagacggtactatcgatgtcgagaacaccaataatctgatttttcaccaccagcggcagaacaatttcagaattactcgccgcatcacaggcaatatgcccgtcaaacacatgaacatcctcgatacgctgcacttgattgcgggcaaccgcagtgccgcacacgccgcgcccgacgggtatccggacacaggcaattttgccctgaaatggtccgagtaccagtgtatcgtcctcaagcaaataaaaacctgcccagtttatgtcagtgagacgctcatataacaacgcactggtgttcgcaagcgttgccagaaaactggtttctcccgccatcagcgcgttaaagtcgcgatttaaatccgcgtaaaattctgttttgttcattatataatcacttggttgtcttacctggatctgccagcctattaaaataagcattaaatgcgttaatgctcaagatcattcccatcatgggttaagattaatgttaattcttattacatttggcacgtcatggctcttaacacaccacaaattacgccgacaaaaaagataacagtgagggcaatcggcgaggaactgccgcgtggtgattaccaacgttgcccgcaatgtgacatgctgtttagcctgcccgagataaattctcatcaaagtgcctattgtccgcgctgtcaggcaaaaattcgtgacgggcgcgactggagcctaacgcgcctggcggcaatggccttcaccatgctgttgcttatgccgtttgcctggggcgaaccgctgttgcatatctggctgttaggcattcgtattgacgccaacgttatgcaaggcatctggcaaatgaccaaacagggcgatgcgataacggggagcatggtctttttctgcgttattggtgccccgctcattctggtgacctccatagcttatttatggtttggtaaccgactgggaatgaatttacgtccggtactgctgatgcttgagcgacttaaagagtgggtaatgctcgatatctacctggtcggcattggcgttgcttctataaaggtacaggattatgcccatatccaggctggtgtcggcttgttctcttttgtggcgttggtgattttaacgacggtgacgttgagtcatcttaatgtcgaagaactgtgggagcgattttatccgcagcgccccgctacgcgtagggacgagaaacttcgtgtctgtcttgggtgccattttaccggctatccagatcagcgtggtcgctgcccgcgttgccatatcccgctacgcctgcgtcgccgtcatagtctgcaaaaatgctgggcggcgctgttagcgagtatcgttttattgttacctgccaacctgttgcctatttctatcatttatctgaacggaggacggcaggaagatacaattctttccggaattatgagcctggcaagtagcaacattgcggttgcaggaatcgtgtttatcgccagtattctggtaccgtttactaaagtgatcgtcatgttcactttactgttgagcattcattttaaatgccagcaaggtttacgcacacgcattctgttactgcggatggtgacctggattggtcgctggagcatgctcgacctgtttgtcatatctttaaccatgagcctgattaatcgcgatcagatcctcgcttttactatgggaccggctgcgttttatttcggcgcagcggtaattttgactattcttgctgtggaatggctggacagccgcttactttgggatgcacatgagagtggaaacgcccgcttcgacgactgaataaccgcttactttgggatgcacatgagtcaggaaacgcccgctagcacgactgaagcgcagattaaaaataaacgccgtatcagtcctttctggctgctgccgttcatcgcgctaatgattgccagttggctgatttgggacagttatcaggaccggggtaataccgtcaccatcgactttatgagcgcggatggtattgttccaggccgtacgcctgttcgttatcagggcgttgaagtcggaacagtgcaggatatcagcctcagcgacgatcttcgtaagattgaagtcaaggtcagcatcaagtccgatatgaaagatgcgctgcgcgaagagactcagttctggctggtgacgccaaaagcaagcttggcaggtgtctccgggctggacgccctcgtcggtgggaactatatcggcatgatgccgggtaaaggtaaagagcaggatcactttgtcgcactcgatacccaaccgaaatatcggctggacaatggcgatctgatgatccacctgcaagcccccgatctcggtagcctgaacagcggtagtttggtctatttccgcaagatcccggtgggaaaagtctacgactatgccatcaatcccaacaagcaaggcgtggtgattgatgtcctgatcgagcggcgttttaccgatctggtgaaaaaaggtagccgtttctggaacgtttccggcgttgatgccaacgtcagtatcagtggcgcgaaggtgaaactggaaagcctggcggcactggttaacggtgcgattgccttcgatagtccagaagagagcaaacctgccgaggcggaagatacctttggtctgtatgaagatctggcccacagccagcgtggcgtaataataaaactggaactgccgagtggggccggattaaccgccgacagcacgccgttaatgtatcaggggctggaagtcggacagctgactaaactggatttaaatcctggtggtaaagtcacaggggaaatgaccgttgatcccagcgtcgttaccctgcttcgtgaaaatacccgcatcgaattacgcaacccgaaattatcccttagcgatgctaatctcagcgccctgctgaccggcaaaaccttcgagctggtgcccggcgatggcgagccacgcaaagagttcgttgttgtgccaggcgaaaaagcactgctgcatgaacctgatgttctgacgctgaccctgaccgcgccggaaagttacggtattgatgcgggtcagccgctcattcttcacggcgtgcaggtaggccaggttatcgatcgtaaactcaccagcaaaggcgtcacctttaccgtcgccatcgagcctcagcatcgcgaactggtaaaaggcgatagcaaatttgtcgtcaacagccgtgtcgatgtgaaggtggggctggatggcgttgagtttctcggtgccagcgccagtgaatggatcaatggcgggatacgtattctgccgggcgataaaggtgagatgaaagccagctatccactgtatgccaatttggaaaaagcgctggagaacagccttagcgatttacccaccacaaccgtgagtttgagtgcagagacgctgccggatgtgcaggcaggaagcgtagtgctgtaccgtaaatttgaagttggtgaagtgattaccgtgcgtccgcgagctaacgcgtttgatatcgatctgcatattaagccggagtatcgcaaccttctgaccagcaatagcgtgttctgggcagaaggcggggcgaaagttcagctgaatggtagtggtctgaccgtacaggcatccccgctctccagagcattaaagggagccattagcttcgacaacctcagcggtgccagcgccagtcagcgtaaaggcgataagcgtattctgtatgcttccgaaacagcggcccgtgcggttggcgggcagattacgcttcacgctttcgatgccggaaaactggcggtcgggatgccaattcgctatctcggtattgatatcgggcaaatccagacgctggatctgattaccgcacgcaatgaagtacaggcaaaggcggtactttacccggaatatgtccagacctttgctcgcggtggtacgcgcttcagtgtggtcacaccgcaaattagcgcagctggcgttgagcatcttgatactatcctccagccgtatatcaacgtcgaaccaggccggggcaatcctcgccgcgactttgaattacaagaggccaccattactgatagccgttacctggatggcttaagcattattgttgaagcgccggaagccggtagcttaggcatcggtacgcctgtgctgttccgtggtctggaagtcggtacggttacaggaatgacgctggggacattgagtgatcgcgtgatgattgcgatgcgcatcagtaaacgctatcaacacctggtgcgtaacaattccgtcttctggttggcaagcggttacagtctggactttggtctgacgggcggcgtagtgaaaaccggcacctttaaccagtttatccgtggcggcatcgccttcgccacgcctccgggtacgccactggcaccgaaagcccaggaaggcaaacacttcctgttgcaggaaagtgaaccgaaagagtggcgtgaatggggaactgcgcttcccaaataatgcccactgctccggcgtgcctgcgccggagcgtttatgctaaactgcgcgcctgtttttttgccagtggtacatgctcgtggcccaacacaccgtttatttcccggacgcctttctgacacaaatgcgcgaagcgatgcctagcacgctcagttttgatgattttcttgccgcctgtcagcgcccgttgcgccgcagcattcgcgttaatacgctgaaaatctccgttgctgatttcctgcaattaaccgctccttatggctggacgcttacgccaattccgtggtgtgaagaaggtttctggattgaacgcgacaatgaagatgcattgccattgggtagtaccgccgagcatttaagtggcctgttttatattcaggaagccagtagtatgttgcctgttgccgccttgtttgctgacggtaatgcaccacagcgggtgatggatgtcgctgccgcgcctggctccaaaacgacgcaaatttccgcgcggatgaataacgaaggggcaatccttgccaatgagttttccgccagtcgggtaaaagtgttacatgccaatatcagccgctgtggtatcagtaatgttgcgctcacacattttgatggccgcgtgtttggtgcggcagtgccagaaatgttcgatgccattttgctggacgctccctgctctggcgaaggcgtggtgcgtaaagatcccgatgcgctaaaaaactggagtccagaaagcaatcaggaaatcgcagctacacaacgggagcttatcgacagcgcctttcatgcattacgtcctggtggtacgctggtttacagcacctgtaccttaaaccaggaagaaaacgaagccgtttgcctgtggctgaaagagacttaccccgacgcagtagagtttttaccacttggcgatctcttccctggtgcaaacaaagcgctgaccgaagaaggctttttgcatgttttcccacaaatttacgactgcgaaggcttcttcgttgctcgtctgcgtaaaactcaggcgattcccgccttacccgcccccaaatacaaagtcggtaattttccgttcagcccggtgaaagatcgcgaagctggacaaattcgtcaggcggctacaggtgttggcttaaactgggatgaaaacctgcgcctctggcagcgtgacaaagaactgtggttgttcccggtgggcattgaagccctgatcggtaaagtccgattttctcggttggggattaaacttgccgagacgcacaacaaaggttatcgctggcagcatgaagcggttattgctcttgccagtcccgataatatgaatgcattcgagctgacaccgcaggaagcggaggagtggtatcgcgggcgcgatgtttacccgcaagccgcgccagtggcggatgatgtattggttactttccagcatcaaccgattggtttagccaaacggattggtagccgattgaaaaacagctatccgcgtgaactggtgcgcgatgggaaactttttaccggtaacgcctgacagcgcacaaaaaaagcgcactttttgactggcacattcggctgcctcaactaggctgaaaaatggtgcgatcggactggtcgtaccacaatcggcagctaaatggagagcacgaagatgaaaaccagtgtgcgcataggcgcttttgaaatcgacgacggcgaattacacggtgaaagcccaggtgatcgaacgttaaccattccttgtaaatctgaccccgatttatgtatgcaactggatgcctgggatgctgaaaccagtatccctgccctgctaaatggcgaacactctgtcctttaccgtacccgttacgatcaacaatctgatgcctggattatgcgtcttgcctgatccaaaaagaacccgtcggcatggcgggttatttgtcctggttattcccccgttgtaaaatctctcctaaacttaacggtacggcaccacacttcggggatgaaatgttcgcgctggtactttttgtttgctacctggatggcggttgtgaagatattgttgtggatgtctacaacacggaacagcagtgtctttattctatgagcgatcaacggatccgccagggcggttgttttccgattgaggattttatagatggtttctggcgacctgcacaggagtacggtgatttttaattattgcaattgcacaagagtcagttcgcccccaaagacagcaccggtatcaatataatgcaggttgccaatatccacgcgatgtcgcaacggtgtatgaccaaaccagaaatgatcagcacctgtaattccctgccctttttggcgttcacctaatcggctgcggctccacaagacctgatgcaaatcaacgtccttttgccattcataaacatcatctggataatcggcatgagcaataatatgcttgccggtgcgactgtgtacttcaagaataaagggcaaatgctgacatttttccagcgccgttttcgcttgtttctgttgattatctgccagcgcaataaaccagtcgccgccattcatcaaccacaaagacatctgctgggatgccagcgcatccatcgccatctgttcatgattgcctcttaccgcacaaacccaatgttgttccagtaactgcagacaacgtaaactttgcggcccacgatcgataacgtctcccacactgataagtaaatctcgccacggatcaaaacgacaatgccataatttgcggcgcaactgctcaagacaaccgtgtatatcgccagaaagccagatatgtcgccattgatgacccgcaattctctgataaacgggcgcaggctgtttcatcaatattttcctcccgcgctaaagatcacataatcttaacaagaatgttaaaaaacgctggactcagacagtagagtgtgtgttatggttgactataaagtcagcgaaggaaatgcttctggcttttaacagataaaaagagaccgaacacgattcctgtattcggtccagggaaatggctcttgggagagagccgtgcgctaaaagttggcattaatgcaggcttagttgccttgccctttaagaatagatgacgacgccaggttttccagtttgcgtgcaaaatggtcaataaaaagcgtggtggtcatcagctgaaatgttaaaaaccgcccgttctggtgaaagaactgaggcggtttttttattggaaatcaaaaggctattttaggtaattaacagagtttttcagctcgttctataaacggtgccagactcattttttcgccgggattgttaggatcatcaatctgaatcacgctaatgggttgggcattggtcttcccactggcaacttccttttgtgcgatatcgtttaaaggatactgcacgagggtactcggattaataacatacaaagcattacccggtcggcaagtcagcatcacctcttcgcgattaaacgcccatttgtctttacccacttcaaaacgactgacggtaatcacctgcggtgcagccagcgccgctgcagaactggtgagtaacagaaacgccagaatactttttttcatcattttcgtaatccatcaaaaaggttcgagagtcgcaagcaggctgatgatcaccagcactaccgcacctatcgcccattcgagtttagtcatccacacaaaccagggtgccgcacgatcttcatcctgcctcatgcgcggtacaagaacataacgattagccagcgcaatgaccaccataatcatcaccaggatggctttgagcaataagagttggccccagtaagtcgtaagcgtggggggaaatccggtaatcaacaatgcattaagcacgccgcttgccagtacgccgatcaccgcaaaatgcccgcaccaggaaaaacgcatcagcgcctgaatagcctggtgtcgccaacggcctttgatgagttgcatacaccagagcaccggcagtaatcccccaaaccacgccgccgcacaaatcaggtgaatcgcgtgattagtctgatggattttcgctgttaccccttcattcagcgtcgcatgccccactcccgccagcagaataaattgcgcggtagtgagcataaacagcaaacgtggcatattccgcggttgcataagggcgacgatcaacgttacgagggcgagaacaatttgccataaccagatgccaccaaactgcgtttgcaaaacagcctgccaaatgtttgggctaaatacatctgtccatcccgttcccatcaacccgccctgaacggcgagcattgcagtggcactgatcaaactccagacggcagcgtgctgttgtaaacgcagaaaacgcttcgccagcaagcgacgaatcgtcaagggggccagccaggcaccgtacattgcgaagccaaaaaccagcatcaggctggtgaaatggataaatcgcagcgcgatccaggtaaacgccagcatgatttatttcacgctaaaggtgtagtgtcctttcgttttatgcccgtccacgctaacaacatgccagtcaacggtgtaggttccgggtttcaggctatcggccagtggaacaatcagttgcttttggtcctgctcatttcgcttcgccggtaatgttttaatattttcgttttttggccccgtgatttttgcaccactgaatcctgtttcaacaccttcgctgaagtttaaagtgattgcctgcggtgcagctgtcacttgcgcgtttgccgcaggatactgatgcgttaaatgcgcatgtgcccagacggaaggtgtcaccaagctagtggtcaggattgccagcgcgtagcgaagggagcgtgcagtactagccatattatctattcctttttgtaataacttttttacagagcataaccttgtctaatgtctgagtcgaggatcatcaattccggcttgccatcctggctcactcttagtaacttttgcccgcgaatgatgaggagattaagaatgctgaagaatctggctaaactggatcaaacagaaatggataaagtgaatgtcgatttggcggcggccggggtggcatttaaagaacgctacaatatgccggtgatcgctgaagcggttgaacgtgaacagcctgaacatttgcgcagctggtttcgcgagcggcttattgcccaccgtttggctagcgtcaatctgagtcgtttaccttacgagcccaaacttaaataaaacttatacagagttacactttcttacataacgcctgctaaattatgagtattttctaaaccgcactcataatttgcagtcattttgaaaaggaagtcattatgagcttctggaaagttgcagcagcgcaatatgagcctcgtaaaaccagtctcaccgaacaggtagctcatcatctggagtttgtgagggccgccgccaggcaacaatgtcagctgttagtttttccaagcctttctttactggggtgtgattatagccgacgtgcccttcctgccccacccgatctcagtctgttagacccgctttgttatgccgcaacgacctggcgaatgaccatcattgccggccttcccgttgaatataacgatcgctttattcgtggaattgcggtgttcgcaccgtggcgaaaaacgcctgggatctaccatcagagtcatggtgcatgtctgggccgtcgttccagaaccatcacggtggtcgatgaacaaccgcaaggtatggatatggacccgacctgtagtctgtttactacagggcaatgtctgggagaacccgacctgctggcgagcgcccgtcgcttacaattttttagtcatcagtacagcattgccgtgctgatggcaaatgcccgtggtaacagtgcactatgggatgaatatggtcgtctcatcgttcgcgccgatcgtggtagtttattgttagtcggtcagcgtagtagtcagggttggcaaggcgatatcattccattacgctaagctttttcggcctggagcatgccatgttgcgcattatcgatacagaaacctgcggtttgcagggagggatcgttgagattgcctctgttgatgtcattgacggaaaaatcgtcaaccccatgagccacctggtgcgccccgatcgtcctattagtccacaagcgatggcgattcatcgcatcaccgaagccatggtcgccgataaaccgtggattgaagatgtgatcccacactattacggtagtgaatggtatgtcgcgcataacgccagctttgaccgccgcgtactgcctgagatgcccggtgagtggatttgcactatgaaactggcccgtcgtttgtggcctgggatcaagtacagcaatatggcgttatataaaacacgcaagctcaatgtacagacgccgccgggcctgcatcatcaccgcgcgttgtatgactgttatatcaccgccgcgttgcttatcgatattatgaacacctccggctggacggcagaacagatggccgatatcaccggacgtccgagcttgatgacgaccttcacctttggcaaataccgtggcaaagcggtttccgacgttgccgaacgcgatccgggctatctgcgctggttatttaataacctggacagcatgagcccggagctgcgtttaacactgaaacattatctggaaaatacttaatccgcaggcgtagcgggtaatgttccctgcgccagcgcgaccagaaaagcatattccatcgctacgccttcgtagcttttaaagcgaccagatttaccgccatggccactgtccatgtcggtacagagcaataaaagatggtcatcggttttcagctcgcgcaatttagcgacccattttgccggttcccaatattgcacctgagaatcgtgcaaaccggtcgttaccagtaaatgcggataagcctgtgcggtgacgttgtcatacgggctgtagcttttcatgtactcgtaatattgcggatcctgcgggttaccccactcttcaaactcaccagtggtaagaggaatactttcatcaagcatcgttgttacaacatcaacaaacggtacctgggcgataacgccgtggaataattccgggcgttgattaattgcaacgcccatcaacatgccccccgcactcccgcccatcgcataacaaaggctaggagagccatagcccagttttaacaatgcatcgcaggcatcaagataatcattaaacgtatttttcttcttcagaaattttccgtcttcgtaccattgttgccccagctcaccaccgccgcgaacatggacaatggcgtagacaaagccacgatctaacaaactcaagcggctaaaactgaaatcggcatcaatacttgcgccgtaagaaccatagccatacaccagcaacgggttgtgtcctttgcgaaaatgtttgcgatggtagaccaagctaaccggaacttcgacgccatcacgggcgactatccacaggtgttcactgcggtaattcgccgcataaaaaccaggaacttccgtttgttttaatacacgacgctcaccggtatccatatccagttcaaacaaagtgtctggtgtagtcatggaagaataaccataacgcaatcgcgcggtttcaggttctggattgtaggcaatccaggtcacataggccggatcatcaaaggcaataccaatgacttcccgggtcttgcggttaatttggcgcaaactggttaacccgcgctgacgctcttcaaccaccagccagtcggtaaacagcgtaaacccttccagcatgatgttttcgcgtggcggaattaactcttcccactgttgctcatcacgcatacgggtacggtataagccaaagtttttgccgtggcggttggaacgcagataaaaacgatgctggtagtgatcaaggctgtattcgtgatctttgcggcgcggcagaaaaacaaacggctcggcatcggccatttccgcgtccagcaggcgaacttcactggtggtggcgctggccaaatgaatgactacatagtgcttgctggtcgttttatgcaggctgacgtaataggtatcgtctttttcttcgtagatcagtttatcttggcttgctggcgtaccgatggcgtgacgccagacctgataaggcagcagcgtcaccggatgcttgcgaacatagtagaaaatccaggagtcatttgcccagacaaagctgggttcaacgttatccagcagttccgggtaccagttaccagtttccagattacgaaaacgaatgccgtactggcgtcgggaaagaaaatcttctgccagcgccataatggtgttatcgggcgtaatcgccattccgcccatgctataaaactcactatgagctgcgcgcttattggcatcgagcaatgtttcccactcatcccactcttcactgaatgcgctttgacgctggtagatagcatattcacagcctggttcataaatatgccgatagcggtagccatttttgatgtagggcgcagaaacttctcgttgcggaatgcggtcgatgatttcctttaagatgcgatcctgcaaggcttgttgactggccatcacccgatgaccgtaactattttcttgttgcaggtagtccaggacttctggctgagaacgcgtatcgtcccgcagccagtagtaattatcgatgcgcgtatcgccatgaagcgtcatggcgtggggaatgcgggcggcttttggtagcatgttattgttctttctggttgaaacatcttataagggtggcaaaactcaccggggatgcaagcgaaacaggggagtcattgcttagatgatgacaggtaatggcgcggatatcgaatgttatgcagacagagaaaatcagcctgttcaaatggctgtgcgattctggatagcccgaaatagtcaacttcaggctatccagagagcggaattattccgccaaagtgcgtttttgctgttcgagatcgcgttcaatgccgtcacgaacatcctgggggattttcagcgcgtcacccagtgcattcaggtaactgcgttccataaaatggtcaatatcaatagccgcgcaactcaggaaatagatttccagcgcctcttcttcattgcggaccccggtagccaggcgttgtggatccagcggttgttcgattgcctgctcaatgagtacacgcccctgctcttccacgccggctccacgcaattgctggtcgattgccgcacgttctttggcatcaatatgaccatcacttttagcggcaaagaccagcgcaaggatcaaacgtgctgtacgctcatccagcggcgtactttgcgcgccaaactgcggttcgtcctgatgcgccgcgcgaattttatctttgtatttattccacagcaccgtacccgctaccgctccgccgccaaccagtaacgcgttggtgccatatttcgtaagaagtttacgtgcacttttatttgcgaccagcagcccagccagtccgcctaatgcgcctggcactaacagtttgaccaatccctgatccgcagagctggaggtagaagaactgctttgcccaagcagggattgcagttgatttaaccagttagccatatttgctcctcaataaccatttttagtgcctgtagcatagcggatgaggatgtcagaaaatgtatatcgagacaaaagatgcgcaaataagcggggcggtaggccgttattcaaagaaattcgcgccaggtaaggtatttactgtatatcaggtgataagggtattttaggtgaaagtagtttgtcgttttgagtggcattgtttgatgctgattgcccgatgcgacgctgttgcgtcttctcaggcctacgattgtggtgcgttctggggcggacaaggcactcgcgccgcatccgccaacagtcaatcgaattatcagaagccattaacgccgctgatattccgccattcccgctttgcagtccacgctgacctggtaatgaatatcggcacttttaccacgcacggttagcggtacactccatttatcatctttaccctgaatgtcctgcaaactgacccaagccacgggatcggcctgaccgacaattttttgatcatctgcccaacgcgccacgcgattttgttgataatcacgttttacgctcgcggcaattccggcagcatccagatcttcacactttgggaaagtgacgctcttgctggtttcattattggcagcgaaaacacttgcgcaggcagaaaccaacaacagccctaaaaacgcccctctttttttcatgtttttctccatagcacaatgattcaggagaaagcatggtacaaattgtcaggagcgcaagttgcttcaggccgcgtgactggcatcttcctcttcggattcagcaccgacgacctgtggggacggtaatttgccggttttcagaatggtgctcagcacatctttttgttctgccagccataggctaagggcttcacgttgctcgtcttccatttgcactggagaatttgtcagccaggtgtcaagcagatccgccgtatcaagcattttgtcataagcatcggcttcctttttgctggtaaagctcattttctcttcgccctcacgaatgactacgtatttaacttcaaccgccatttgcagcctctcataataactgtgattttatacagtatatttcttttcggttgagaaatcaacatcagcaataaagacacacgcaaacgttttcgtttatactgcgcgcggaattaatcaggggatattcgttatgacgttattaggcactgcgctgcgtccggcagcaactcgcgtgatgttattaggctccggtgaactgggtaaagaagtggcaatcgagtgtcagcgtctcggcgtagaggtgattgccgtcgatcgctatgccgacgcaccagccatgcatgtcgcgcatcgctcccatgtcattaatatgcttgatggtgatgcattacgccgtgtggttgaactggaaaaaccacattatatcgtgccggagatcgaagctattgccaccgatatgctgatccaacttgaagaggaaggactgaatgttgtcccctgcgctcgcgcaacgaaattaacgatgaatcgcgagggtatccgtcgcctggcggcagaagagctgcagctgcccacttccacttatcgttttgccgatagcgaaagccttttccgcgaggcggttgctgacattggctatccctgcattgtaaaaccggtgatgagctcttccggcaaggggcagacgtttattcgttctgcagagcaacttgctcaggcatggaagtacgctcagcaaggcggtcgcgccggagcgggccgcgtaattgttgaaggcgtcgttaagtttgacttcgaaattaccctgctaaccgtcagcgcggtggatggcgtccatttctgtgcaccagtaggtcatcgccaggaagatggcgactaccgtgaatcctggcaaccacagcaaatgagcccgcttgcccttgaacgtgcgcaggagattgcccgtaaagtggtgctggcactgggcggttatgggttgtttggtgtcgagctatttgtctgtggtgatgaggtgattttcagtgaggtctcccctcgtccacatgataccgggatggtgacgttaatttctcaagatctcagtgagtttgccctgcatgtacgtgccttcctcggacttccggttggcgggatccgtcagtatggtcctgcagcttctgccgttattctgccacaactgaccagtcagaatgtcacgtttgataatgtgcagaatgccgtaggcgcagatttgcagattcgtttatttggtaagccggaaattgatggcagccgtcgtctgggggtggcactggctactgcagagagtgttgttgacgccattgaacgcgcgaagcacgccgccggacaggtaaaagtacagggttaaacccggcaaaaaaacgctacaaaaatgcccgatcctcgatcgggcattttgacttttacagcttagcgccttctacagcttcacgcgccagcttagtaatgcggtcgtaatcgcccgcttccagcgcatctgccggaaccagccaggaaccaccgatgcacagcacgcttttcagcgccaggtagtcacggtagttagccggagaaataccacccgtcgggcagaaacggacctgggagaacggacccgcgatcgcctgcagggctttcacgccgccgttagcttcagccgggaagaatttgaactctttcaaaccgtagtccatacccagcatcagttcggaaacagtgctgatccccggaatcagaggaatagtcccttcggtagcagctttcagcagcggctcggtcagacccgggctaattgcgaactgtgcacccgcttcagtgacttctgccagctgctgtggattcagcaccgtaccggcacccacaatcgcttcaggcacttctttggcgatagcacggatagcgtcaactgcacactcggtacgcagagtcacttccagaacgcgcaccccaccagcaaccaacgcttttgccatcggcaccgcgtgttccagtttttttaccacgataaccggtacaaccgggccggtggtcaggatactttctgcacttgttttccagtttttcatcagagttttctctcgcctgattacaaatttgtcgtcttaaaaagtgatacaggttgcgccctgttcggcaccggacagtttttcacgcaaggcgctgaataattcacgtcctgttcccacgcgactcgcgctcaggtcaggaatgtgcggttcgcgagcagccagttccgcttcgtctaccagcagcgtcagttcgcctgtctgtccattcacacgaatgatgtccccgtcgcgcacttttgccagcagcccgccatcgtaggcttctggtgttacgtggatagcactcggcactttaccactagcgccggagagtcgtccatcggtaactaacgcaattttgaaacaccggtccaataatacaccaagtggcggcatgagtttatgtaattctggcattccgttcgcttttggcccctgatgacggacaacaacgacacaatcgcggtccagcaaacccgcttcaaaggccggcataacgtcatgctggctttcaaaaacaaccgctggcgcttcaatcacctggttctcaaccggcacggcagaggttttcataaccgcacggcccaggttaccgcttaacacttttgtcccaccatgatgagagaaaggttgttcgaaggaagcgatcacattgctgtcgagacttttttccgccccttcccgccagtccagttcaccattattcagccatggttcaagggtataacgagacagaccaaaacctgccaccgtattgacatcttcatgcagcaggcctgctttgagcagttcacgcaccagaaccggtacgccacctgccgcctggaagtggttaatatcggccggaccgttcgggtagagacgtgccatcagcggtacaacatcagaaaggtcagagaagtcatcccagttaatctgaataccggccgcgcgcgccatcgccaccaggtgcatggtgtggttagtggaaccaccggtcgccagcagtgcaacgataccgttcaccaccactttctcatcgatcatcttaccgatcggcatccattcattaccattaccggtcatgcgtgtaacctgacgcgcagctgcggcggtcaaagcatcgcgcagcggagaatccggatgaacaaaagaagagcctggcaactgcatccccataaactccaccaccatctggttggtgttggcagtaccgtagaaagtacatgttcccggcgcatggtaagacgcggcttcactctccagtaaggccatgcggtccactttaccttcggcataaagctggcgaatacgcactttttctttatttggcaaaccgcttgccatcggtccagacggcacaaacaccgcaggcaaatgaccaaagctcagggctgccatcgtcagacccgggacaatcttgtcgcacacaccgaggaacagagcaccatcaaacatgttatgggacagccccaccgccgcagacatcgctatcacttcgcggcttagcaggctcaattccattccatcctgcccctgggtgacaccatcacacatcgccggaacaccgcccgcaacctgaccaaccgcattcgcttcatgcagggctttacgaatgatttctggatagtgttcataaggctggtgcgcggagagcatgtcgttataggaggtgatgatggcgatattgttacgcaacatgcttttcaaagaggctttgtcttctggctggcaggcagcgaaaccgtgtgccaggttaccgcatgccaactggctacgatgaacggtgctagttttcgcttgttctatccgggcgagataagcagagcgagtctcgcggctacgttcaatgattcgatttgttacgcgtaacaattgtggattcataaaggctcctgaaattgagttgtcagagcaggatgattcacaacgcgtttcattcagaggatttatgactgaaacgcctgtaaccggagctcatagggcaaaaacgtttcagtcagtgtaataaaaaaagcctcgtgggtgaatccgcacgaggcctgaaagtgtaaaaattgttctacaatctgcgcaagatcatgttaccggtaaaataaccataaaggataagcgcagatattactcaaactcattccaggaacgaccatcacgggtaatcatcgccacgctggcaacgggtccccaggttccggcctgatacggtttcggcgcatcattgtccatcgcccacgcctcagtaatggagtctacccatttccaggcttcttccacttcgtcgcgacgtacaaacagtgcctgaataccacgcatggtttccagcagcaaacgttcataggcatccgccagatgcgtctgattaaaggtttcactatagctcagatccagcttggtgatttgcaggttatgtttgtggtcaaggccaggaactttattcagtacctggatatccacgccttcatcaggttgcagacggatagtcagtttattctgcggcagatcctgccagctttctttaaacagattcagttcaggtgttttgaaatagaccacgacttcagaacatttggtcggcagacgtttaccagtacgcaggtagaatggcacaccggcccagcgccagttatcaatgtcgacgcggatcgccacgaaagtttctgtattgctgctcttgttcgcgccctcttcttccagatatcccggcacttttttgccctgggcgaagcccgcagtatattgcccgcgtacggttttttcgcgtacgttggagcggtcgatgcggcgcagagacttcagtactttcactttttcatcgcggatgctgtctgcgctcaggtcagacggcggagacatcgcaatcatgcaaagaatttgcagcaggtggttctggatcatgtcgcgcatctgaccggctttatcaaaatagccccagcgcccttcgatccccacttcttctgccacggtaatctcaacatgatcaatggtgcgattgtcccagttattcacaaacagggagttagcaaaacgcagcgccaacaggttcagcaccgtttctttaccaagatagtggtcgatacggtaaacctggcactcctcgaagtattcgccaacctgatcattgatttcctggctggtcgccaggctcgtccccagcggtttctccatgactacgcgtgccggtttagcattcagttttgcctcgccaagccctttgcaaattgcgccaaaagtgctgggcggcatggcaaagtagttaatggtgatacgatttttttgatccagcatcgcgccgagacggctgaatgcagcagtgtcattgacatcgagattacaaaaatccagacgtgcactcagggtgtcccataaaccttcatcaatggtttctttcatgaaagtttcgagcgcctcgcggacaactttggtatatgccgctttatcccagtcagcacgccctacgccgataatccgggtgtccgggttgagctgaccggctttttccagttgatacagggaaggcagcaatttacgacgcgcaaggtcgcctttcgcgccgaaaatgaccaggtcacaggcctgggctgtttgcgttaccgccatgtcattctccttaagttaactaacccggtacttaagccagggtatacttgtaattttcttacggtgcactgtactgcttttacgagcttgcgaaaactgtaaacgcttatccacccgtgcgattacgggaaaagcgcgcaaagtgcggcaaaactgataaaaaaatcatcgttttccattgggtaaaaatctgacactgatcatgttatgaaaaaaaataacaacttttttatctgcttttgtcattaacacggcacacaggcgtaatatctgacaaaactgcatttcgatttctttcagtgcggaaatcgtcattacccgtgagtctctttacatcatgaatatgctggaaaaaatccagtctcagctggaacatttgagcaaaagtgagcgcaaagttgccgaggtcattctggctagccccgataacgcgatccatagcagtattgctgctatggcactggaagccaatgttagcgaaccgacggtgaatcgtttctgtcgcagcatggacacgcgcggttttcctgattttaaacttcatctggcacagagtctggcgaatggcactccctatgttaatcgcaatgtcaatgaagatgacagcgttgaaagttacacagggaaaatatttgagtccgcaatggcaacgcttgatcatgtccgtcatagtctggataaatctgccatcaaccgcgccgtcgacttgctcactcaggcaaaaaaaatcgcctttttcggattaggctctagtgccgccgttgcccacgatgcgatgaataagttctttcgttttaatgttccggtggtgtactccgatgatatcgtgctgcaacgcatgagttgtatgaattgtagcgacggagacgtggtggtgctgatttctcacactggaagaacaaaaaatctggtcgagctggcgcagctggcacgcgaaaacgacgccatggtgattgccctcacctctgcgggtaccccgctcgcccgggaagcaacgctggcaattaccctcgacgtaccggaagatactgacatttatatgcccatggtttctcgacttgcacagctgaccgtgatagatgtgctggcgacaggatttactttgcgacgcggtgcaaaattcagagataacttgaagcgggtcaaagaagcgctgaaggaaagccgttttgataagcagttacttaatttaagtgacgatcgctaaaaacgactgtcactgtcctaatcttatacgacatccgaatgagattaatttatcgccatcgcggcgttatttcattcggatttcatgttcaagcaacacctggttgtttcagtcaacggagtattacatgtccagaaggcttcgcagaacaaaaatcgttaccacgttaggcccagcaacagatcgcgataataatcttgaaaaagttatcgcggcgggtgccaacgttgtacgtatgaacttttctcacggcagccctgaagatcacaaaatgcgcgcggataaagttcgtgagattgccgcaaaactggggcgtcatgtggctattctgggtgacctccaggggcccaaaatccgtgtatccacctttaaagaaggcaaagttttcctcaatattggggataaattcctgctcgacgccaacctgggtaaaggtgaaggcgacaaagaaaaagtcggtatcgactacaaaggcctgcctgctgacgtcgtgcctggtgacatcctgctgctggacgatggtcgcgtccagttaaaagtactggaagttcagggcatgaaagtgttcaccgaagtcaccgtcggtggtcccctctccaacaataaaggtatcaacaaacttggcggcggtttgagcgctgaagcgctgaccgaaaaagacaaagcagacattaagactgcggcgttgattggcgtagattacctggctgtctccttcccacgctgtggcgaagatctgaactatgcccgtcgcctggcacgcgatgcaggatgtgatgcgaaaattgttgccaaggttgaacgtgcggaagccgtttgcagccaggatgcaatggatgacatcatcctcgcctctgacgtggtaatggttgcacgtggcgacctcggtgtggaaattggcgacccggaactggtcggcattcagaaagcgttgatccgtcgtgcgcgtcagctaaaccgagcggtaatcacggcgacccagatgatggagagtatgattactaacccgatgccgacgcgtgcagaagtcatggacgtagcaaacgccgttctggatggtactgacgctgtgatgctgtctgcagaaactgccgctgggcagtatccgagtgaaaccgttgcagccatggcgcgcgtttgcctgggtgcggaaaaaatcccgagcatcaacgtttctaaacaccgtctggacgttcagttcgacaatgtggaagaagctattgccatgagtgcaatgtacgcagctaaccacctgaaaggcgttacggcgatcatcaccatgaccgaaagcggtcgtaccgcgctgatgacctcccgtatcagctctggtctgccaattttcgccatgagccgccatgaacgtacgctgaacctgactgctctctatcgtggcgttacgccggtgcactttgatagcgctaatgacggcgtagcagctgccagcgaagcggttaatctgctgcgcgataaaggttacttgatgtctggtgacctggtgattgtcacccagggcgacgtgatgagtaccgtgggttctactaataccacgcgtattttaacggtagagtaagtacgttgccggatgcggcgaaaacgccacatccggcctacagttcaatgatagttcaacagatttcgaatattctgaagcaaacttgaacttatcatcaggcgaaggcctctcctcgcgagaggcttttttatttgatgggataaagatctttgcgcttatacggctggatttcgcccggtttgcgagttttcagcaattttagtatccaggtgtattgttctggtcgcggaccaacaaaaatctcgacttcttcattcatccgccgcgcaatcgtatgatcatccgcctctaacagatcatccatcggtgggcgcacctgaatcgtcagacgatgcgtcttgccatcataaatcggaaacagcggtacaacgcgcgcacggcacactttcatcaaacgaccaatcgcgggcaacgtcgctttataggtggcaaagaaatccacaaattcgctgtgctctgggccatgatcctgatcgggtaaataatatccccagtacccctgacgtacgctctggatgaatggtttaataccgtcatttctcgcatgcagacgaccgccaaagcgacgacgcaccgtgttccagacataatcaaaaaccgggttgccctgattatggaacatcgctgccattttctgcccttggctggccatcagcatggcaggaatatcgacggcccaaccgtgcggcaccagaaagataactttctcgttattacgccgcatctcttcgatgatctccagcccttgccagtcaacgcgcggctgaattttctccggcccgcgtattgccaactcagccatcattgccatcgcttgcggcgcggtggcaaacatctcatcaacaatcgcttcgcgttcagcttcactacgttctggaaagcagaggctcagattgattaacgcacgacggcgactgctttttcccagtcgtccggcaaaacgtcccagccgtgccagaatgggatcacggaactttggcggcgttaaagcgatacccgccatcgctgctacgcccagccatgctccccagtagcgcgggtggcgaaaggatttatcaaactcaggaatgtattcgctattattttttttcgtttccatgcttttccagtttcggataaggcaaaaatcaatctggtgatagtgtagcggcgcaacttgccccgcaccaaataaaaaaagccggtactgactgcgtaccggctgcgaatggatgttaattaatcaaaccgtagctgcggcacaatctctttggcctgcgccaggaattcgcgacgatcggagccggtcagcccttcggtacgcggcagttttgccgtcagcgggtttacggcctgctggtttatccatacttcatagtgcagatgcggcccggtactacgtccggtattaccggaaagcgcgatacggtcgccacgtttcaccttctgtcccggtttcaccagaatcttgcgcaagtgcatataacgcgtggtgtagctgcgaccatgacgaatagccacataataacctgctgcgccactgcgtttggcaaccaccacttcaccgtcacccacactaagcactggcgtaccctgcggcatggcgaaatcaacacctctgtgtggtgcaacgcgaccggtcaccggattagtacgacgcgggttaaaattagagctgatacggaactgtttcgccgtcgggaatcgcaagaatcctttcgccagaccagtaccgttacgatcgtagaatttgccatcttcagcgcggatagcgtaataatctttaccttcactacgcaaacgtacgcccagcagctggctttgctcacgtttaccatcaagcatttctcgagacattaacaccgcaaattcatcgccttttttcagtttgcggaaatccatttgccactgcatggctttaatcactgcgctcacttcggcgctggttaaaccggcgtttctggcgctggcaacaaagcttcccccgacggtacctttcagcagattgttaacccactctccttgctgcatttcgctggtcattttaaaaccgttagcggcagtacggtcataggttcgggtttcacgacgagacacttcccaggtgaggcgctgcagttcgccgtccgcggttaatgtccaggagagttgttgaccgattttcaggttacgcaattctttgtcggccgcagccagttgggtgatatcacccatatcaataccatactgattgagaatgctgcttagcgtatcgccagtggaaacaacatattcatgcacgcccgcttcaccggcgattttgtcatccagttcgtcctggggaatggcttcatcttcttgtgcagcttgatcaatcggctcactggcttcaggtaagaggctacgaatttcgttctgttccagctcaatggttttgacaattggcgtggcatcacggtgataaacataaggccgccagacagcgacggccagagtaagaacggtgaggctccccaacataacgcggtgtggtcgcggtaaattattaaacgccagggcgacagagcgggctatctgttgcacgtaatcacttcctcattaatctcctttcaggcagctcgcatactggttggctaattgactcaggaattcactatagcttgttttacccagtttgatattcgtccccaggggatccaacgttcccatacgaacggatgtccctcgtgcgacgctctcaacgaccgctggcctgaactgtggctcagcaaaaacgcaggttgctttttgctcaaccaactgtgttcttatttcatgtaaacgctgcgcgccaggttgaatctcagggttaacggtaaaatgaccaagcggtgtcagtccaaactgtttttcgaaatagccgtaagcatcgtgaaaaacgaaataacctttccccttgagcggcgcgagctcgttaccaacctgcgtttcggtactggctaattgtgcctcaaaatccttcaggttggcgtcaagtttggctcgactttgcggcataagttccactaattttccatggattgcaaccgctgtagcccgcgctatctctggggaaagccaaagatgcatgttgaaatcgccgtgatggtgatcttcgtcacttttttccgcgtggtcgtgatcatcatcatcgccgtgaatacttttcatcagtagcggtttcacatcttcaagctgcgcaatcgttacctgcttcgctcctggtaatttgcttaccggtttttgcataaacgcttccatctccgggccaacccaaacgactaagtccgcgttctgtaagcgttttacatcgcttgggcgcagactataatcatgttcactagcgccgtcaggaagtaaaacctctgtttctgttaccccatcagcaatggcagaagcgatgaacccaacgggtttaaggctagcgacaacggcggcatctgcggcctgtgttgcacctccccagagagcggcggataatgctgcgaaaagaagcgtttttttatgtaacataatgcgaccaataatcgtaatgaatatgagaagtgtgatattataacatttcatgactactgcaagactaaaattaacatgacaagtctggtttccctggaaaatgtcagcgtttcttttggccaacgccgcgtcctctctgatgtgagcctggaacttaaacctggaaaaattttgactttacttgggccaaatggcgcaggtaagagcacactggtacgggtagtgctcgggctggtaacacccgatgaaggggttatcaagcgcaacggaaaactgcgcatcggctatgtaccgcagaagctgtatctcgacaccacgttgccactgaccgtaaaccgttttttacgcttacgccctggtacacataaagaagatattttgcctgcactgaaacgtgtccaggccgggcacctgattaacgcaccgatgcaaaagctctctggtggcgaaacgcagcgtgtactattagcgcgagcattgttaaatcgcccgcaattattagtgctggatgaacccactcaaggcgtggatgtaaatggccaggtggcgttatatgaccttattgaccaactgcgtcgtgaactggattgtggcgttttaatggtttctcacgatctgcatctggtgatggcaaaaaccgatgaagtgctgtgcctgaatcaccacatttgttgttccggcacaccggaagttgtttccctgcatccggagtttattagtatgtttggtcctcgtggtgctgaacaactgggtatctatcgccatcatcataaccatcgtcacgatttacagggacgaattgttttgcgtcggggaaatgatcgcagttgatttaacgtcggggaaatgatcgctcatgattgaattattatttcccggttggttagccgggatcatgctcgcctgtgccgcgggtccgctgggtagctttgtagtctggcgtcgtatgtcttatttcggtgatacgctggctcatgccagtttacttggcgtcgcgtttggtttgttgctggacgtgaatccattctatgcggtgattgccgttacgctgctgctggcgggcggtctggtatggctggagaagcgtccacagctggcgatcgacacgttattagggattatggcgcacagtgccctgagcctgggcctggtggtcgtgagtctgatgtctaatattcgtgttgatttgatggcttacctgttcggtgatttgctggcagtgacgccagaagatctcatctctattgcgattggcgtggtcatcgtggtggctattttgttctggcaatggcgcaatttgctgagtatgacgataagcccggatctggcgtttgttgatggtgtgaaattacagcgagtgaaattgttgttgatgctggtgacggcattgacgattggtgtagcgatgaaatttgtcggtgcgttgattattactagcttgctgattattcctgctgctactgcgcgtcgctttgcccgcacgccggaacagatggctggtgtcgctgttttggtggggatggtggcagtgactggcggtttaaccttttccgcggtttacgatacgccggcgggtccgagcgtggtgctatgtgcggcactgttatttattctcagtatgatgaaaaagcaggccagctaatctatcgctgaacacatttgtcggatgcggcgcgagcgccttatccgacctacggttcggtatctctggtagtcctggtaagacgcgaacagcgtcgcatcaggcatattgccagtgccggatgcggcgcgagcgaccaatccgacttacggcatttctggcggcgttatgccaaagtgattccacgcccgcgtcgtcgccatacgcccacgcggtgtacgctgcaaaaagccttgctgaatcaaataaggttccagcacatcctcaatggtttcacgttcttcgccaatggctgccgccaggttatccagacctacaggtccaccaaagaacttatcgattaccgccagcaacaatttgcggtccatataatcgaaaccttcagcatcgacattcaacatatccagcgcctgagcagcgatatctgcgctgatggtgccatcgtgcttcacttcggcgaaatcacgcactcgacgcagcagacggttggcaatgcgcggcgtaccgcgagcgcgacgagcaacttccagcgcgccgtcatcactcatctcaagccccataaagcgtgcgctgcgactgacgatatattgcagatccggcacctgataaaactccagacgttgcacaataccaaaacggtcgcgcaacggacttgtcaggctacctgcgcgcgtggttgcaccaatcagggtaaacggcggcaaatcaattttaatggagcgtgccgccggaccttcaccaatcatgatatccagttggtagtcttccattgccgggtacagcacttcttcaacaactgggcttagacggtggatctcatcaataaacagcacgtcatgcggttcaaggttagtgagcatcgcagccaaatcgcccgccttttccagcaccggaccagaagtcgtgcgtaaattaacgcccatttcattggcgacaatgttggcaagcgtagttttacccaaccccggaggaccaaaaatcaacaaatgatcgagggcatcgccgcgcagtttcgctgctttgatgaaaatctccatctgactacgaacctgcggctgaccaacatactcttccagtaatttggggcgaatggcgcgatctgctacatcttccggcaaagtggtaccggcagaaatcagacggtctgcttcaatcatcctttacctcataacgcggcgcgtagggcttcgcgaattaaagtttcactgctggcgtcagggcgagcgattttgctcaccatgcggcttgcttcttgtggtttatagcccagcgccaccagcgcggcaaccgcttcttgttcagcatcgtcggtcgccgggctggcaggagacgtgagtaccaggtcggcggctggcgtaaagagatcgccatgcaaacctttaaatcggtctttcatttcaacaatcaagcgttcggcggtttttttgccaatacccggcagtttcaccagtgcccccacttcttcacgctcaacggcattaacgaactgctgcgcactcattccggagaggatcgccagcgccaacttcgggccgacgccgttggttttgatcaactctttgaacaatgtgcgctcttgtttattgttaaaaccgtacagcagttgcgcgtcttcacgcaccacaaagtgggtgaaaacgatcgcttcctgacccgcttcagggagttcataaaaacaggtcatcggcatatgcacttcatagcctacgccgcccacttcaattaacaccagcgggggttgtttttcaatgatgatgcctctgagtctgcctatcacatgacgctcctgcgtaatgaatcaaagataatgctgtatgataaaaaaatgctggatagatatccagcgaaggatgaagaaaacttgcgaggtgtctcgatgaactgaaaaatggcacagtataatttattctacaggttatattggaagcaaatattttaatattacatattcagtgaagaaatgcgtaataaaaatatacattgcgcctcctgaaaaaataaattttttatgctattacgtatatttgtatctatttcaatggaatgacaacgtgaatattaattaccctgctgaatatgaaattggagatatcgtctttacatgtataggtgctgccttatttggtcaaataagtgctgcaagtaattgctggagtaatcacgtcgggatcattatcggtcataacggtgaagacttcctggttgcagaaagccgggttccccttagtaccatcaccacgctatctcgttttattaaacgtagctctaatcaacgctatgctataaagcgattagacgctgggctgacagaacgacaaaaacaacgaattgttgaacaggttccctcccggctacgcaaactttaccacaccggttttaaatacgaatctagccgccagttctgtagtaaatttgtttttgatatttataaagaagcgctatgtattccggtgggtgaaatagagacgtttggagaattgttaaatagcaatccgaatgcaaaactcactttctggaaattctggttcctgggttctattccgtgggagcgtaaaaccgtcacgccagccagtttgtggcatcatccgggtttggtgttgattcatgcggagggagtggaaacgcctcagccggaactgaccgaggcggtataacttaacgcagtcgccctctcgccaggttcagccggctttcgctcatctgcatcgcattctgactaacgtggcagtgggtgatagcaatcgccagcgcatcggcggcatccgcctgtggattagcgggcagtttcagcaaggtgcggaccatatgctgcacctggcttttttcggcactgccaatacctaccaccgtttgctttacctgacgtgccgcgtattcaaatactggcaactcctgattcaccgccgccacaatcgccacgccgcgcgcctggcccagtttcagggcactgtcagcgttctttgccataaagacttgttcaatggcgaaataatcaggctggaactgggtgatgatttccgtcacgcccgcatagatgagtttcagacgagacggtaaatcatccactttggtgcggatgcatccgctacccaggtaggacagttgcctacctacctggcggatgacgccgtagccggtcacgcggctacccggatcaatgccgagaataatagccatcacgcgtctccgttttgctgtttagcaggcctcatcagagagtcgctgcgacctcatcagagatttcaccgttatggtaaacttcctgcacgtcgtcgcaatcttccagcatatcgatcagacgcatcagtttcggtgcggtttctgcatccatatcagctttggtagacgggatcatggaaacttccgcgctgtctgctttcagacctgccgcttccagagcgtcgcgcactttacccatttcttcccatgcagtgtagacatcaatcgcgccgtcatcataggtcacaacgtcttcagcacctgcttccagtgctgcttccatgatggtgtcttcatcgcctttctcgaaggagatcacgccttttttgctgaacagataggcaacggaaccatcagtaccgaggttaccgccacatttgctaaatgcatgacgcacttcagcaacggtacggttgcggttgtcagacagacattcaatcatgattgccgtgccgccaggaccgtaaccttcgtagatgatggtttccatgtttgcatcatcatcaccgcccacaccacgtgcaattgcgcggttcagtgtgtcacgggtcatgttgttagacagtgctttatccaccgccgcacgcagacgcgggttagcgtccggatcgccaccgcccagcttagccgcggttaccagctcacgaatgattttagtgaagattttaccgcgcttagcatcctgcgcagctttacgatgtctggtgttggcccatttactatgacctgccataaaaatatctccagatagccctgcctgttcaggcagcgttaattacaaactgttcaatcgcctgccggttgctccaggacttagtgagcgccgccgcagcaggcgcatcaagccacttgtaagccagatgttcagtgaaaacgatctgccgctcgtgcggaagcgcaagacagaaccaactttccgtattacgcgtcacgcccggcgcatagcgatgacgtaaatgactaaaaatttcaaactctaccgtgcgctgacagtcaattaaggtcagttgttcagcgacaacatcaatggtgacctcttcctttacttcgcgcatggcagcttgcggcgcggtttcaccctcttccacgctgccggttacgctctgccagaaatcgggatcgtcacgccgctgcaacatcagcacccgtttcgtatcttgtgcgtagatgaccactaagatgctaacgggacgcttatacactttatccttcacgctgcctcttcgttgactgccttcgctcatcccattcacatagttatctatgctcatgggagttcactcagttgccgcctcgatgcaacgcgaatgatttcgtgtatttgagtcatatcagttattctcagccttcttcacaacctgaatgctcagctcagccagtgcagtcgggttagcaaagctcggtgcttcagtcatcagacacgctgccgccgtggttttcgggaaggcgataacgtcacggatattgtcggtgccggtcagcagcatggtcagacggtcaagaccgaatgccagacctgcgtgcggcggagtaccgtatttcagagcgtcgagcaggaagccgaatttctcgcgctgttcctcttcgttgatacccagaataccaaacaccgtctgctgcatatcaccattatggatacgtacactaccaccgcccacttcgtaaccattgatgaccatatcgtaagcgttcgccaccgcattttccggtgcagctttcagttctgcagccgtcatatctttcggactggtgaacggatggtgcattgccgtcaggccgccttcaccgtcgtcttcaaacatcgggaagtcgataacccacagcggtgcccatttgctttcgtcggtcagaccaaggtctttacccactttcaggcgcagtgcacccatcgcgtcggcaacaattttcttgttgtcggcaccgaagaaaatcatatcgccatcttgcgcggcagtacgatccaggatgtcttcgatgatttctgcattaaggaacttcgctaccgggctgttgataccttccagacctttcgcgcgttcgttaactttgatgtaagccagacctttcgcgccgtagattttaacgaagttaccgtattcgtcgatctgcttacgggtcaggcttgcgccgcccggaacgcgcagagccgctacgcgacctttcggatcgttcgccggacctgcaaatacagcaaactcaacagatttcagcagatcagcaacgtcagtcagttccatcgggttacgcagatccggtttatcagaaccataacggcgttctgcttccgcaaaggtcattaccgggaaatcgcccagatccacacccttcacttccagccacagatgacgcaccagcgcttccatcacttcacgcacttgcggcgcggtcatgaaagaagtttccacatcgatctgagtaaattcaggctgacggtcagcacgcaggtcttcgtcacggaagcatttaacgatctgatagtaacggtcaaaaccggacatcatcagcagctgtttgaacaactgcggggattgcggcagtgcgtagaatttacctttgtgcacacgagaaggcaccaggtagtcacgcgcgccttccggcgtggctttggtcagcatcggagtttcgatgtcgaggaagccgtggtcatccataaaacggcgcaccaggctggtgattttagcgcgggttttcaggcgctgagccatttccggacgacgcaggtcgaggtagcggtatttcagacgcgcttcttcggtgttgacgtggttagagtcaagcggcagaacatctgcgcggttgatgatagtcaggctggacgccagcacttcgatttcgccggtcgccatatcgcggttaatatttttttcgtcacgcgcacgtacggtgcccgtgacctgaatgcagaactcattacgcagttcagaggccagctttaacgcgtccgcacgatccggatcgaaaaatacctgcacgataccttcgcggtcgcgcatatcgatgaagatcaggctaccaagatcacgacgacggttgacccaaccacacagagtcacctgctgccccacgtgggacaaacggagctgtccacaatattctgtacgcatgagatatcccttaacttagctgccggcggatgccccctgctgcgcaggtgaccaagtcgcagcgttagctgtatgtcacaactgaatgaaaaaaggcggctattatactggaaattctgccgcaccgtaagagcctggcccgcgctggaacgcctcgttaccactttatatcgggcctgaaatcagactctacgccagtttgctataaaggtgttgcccgaactcataaaaattaacaaaatttgtcgttccgccatcggctaatcgcattaaggtgtgaggcacgattttgttttttcaggagtcattatgcttgaacttaatgctaaaaccactgcgctggtggtgatcgatttacaagaaggcatcttaccttttgccggtggtccacatactgccgatgaggtagttaatcgcgccgggaagctggcggcgaaatttcgcgccagcggtcagcccgtgtttctggtgcgcgttggctggtctgccgattacgctgaagcattaaaacagccggtcgatgcgcccagtccggctaaagtgttgcccgaaaattggtggcaacatcctgctgcattaggtgcaaccgacagcgatatcgaaatcatcaaacgtcaatggggtgcgttttacggtacggatctggagttgcaattacgccgccgaggtatcgatacaatagtgttatgtgggatcagcaccaatatcggtgttgaatccaccgcccgcaatgcctgggaacttggctttaatctggtgattgccgaagacgcctgtagtgccgccagcgccgagcagcacaataacagtatcaaccatatctacccgcgcatcgcccgtgtgcgtagcgtggaagagatcctcaacgcgttatgatttacatcggtctaccgcaatggagccatcctaaatgggtgcggttggggatcaccagccttgaagagtatgcccgccactttaactgcgtggagggcaacaccacgctttacgccctgccgaaacccgaggttgtcctgcgctggcgtgagcagaccacagatgacttccgcttctgttttaagtttccggcgaccattagccatcaggcagcattacggcattgcgatgatttagtgactgaatttttgacccgcatgagtccgttggctccgcgcattgggcaatactggctgcaactgcctgccacattcggcccacgggagctgcctgcgctttggcattttctcgattctcttcctggcgaatttaattatggcgtggaagtccgccatccacagtttttcgccaaaggagaagaggaacaaacgcttaatcgcggtttacatcagcgcggcgttaatcgggtgattttagacagccgcccggttcatgcagcacgtccacacagtgaagctattcgcgacgctcaacgaaaaaaacctaaagttccggtacatgctgtactgacggcgacaaatccgctgatccgttttatcggtagtgatgatatgacgcaaaaccgggaattatttcaggtctggttacaaaaattagcgcagtggcatcagaccactacgccttatctttttttacatacgccagacattgcccaggcaccggaactggtacataccctgtgggaagacttacgtaaaacgcttccagagatcggagcagttccggctattccacagcaatcttctcttttctgaatttgccacctatcatagacaggtgccatcggccattttaaagggagtttgtatggtaagcgcgctgtacgccgttttaagtgcgttgttattaatgaagttctcttttgatgtcgttcgcctgcgaatgcagtaccgcgttgcctatggcgacggcggttttagcgaactgcaaagcgctattcgcattcatggtaacgcggtggaatatattcccatcgcgattgtgctgatgctgtttatggaaatgaatggcgcagaaacctggatggtgcatatttgcggcatcgttttgcttgctggtcgtctgatgcattattacggttttcatcaccgtctgttccgctggcgacgttccggcatgagcgccacctggtgtgcgctgttgctgatggtgctggcgaatctttggtatatgccctgggagttggttttctccctgcgttaacgcacaatacgccactttctttttcccggatttttacgttatgtctcaccgcgacacgctattttctgcccctatcgccagactgggcgactggacctttgatgaacgggtagctgaagtcttcccggatatgatccagcgttccgtacccggctattccaatattatttccatgattggtatgttagccgagcgcttcgttcaacctggtacgcaggtttacgatctgggttgttctctgggcgcggcgacgctcagcgtgcgtcgcaacattcatcatgataattgcaaaattattgccatcgacaactccccggcgatgattgaacgctgccgtcgtcatattgacgcctataaagcccctacgccagtagacgtcattgaaggtgatattcgcgatatcgccattgaaaacgcaagcatggtggtgctgaattttaccctgcaattcctggaaccttccgagcgccaggcgttactggataaaatttatcaagggctgaaccccggcggcgcgctggtgcttagcgaaaaattcagtttcgaagatgccaaagttggtgaactgttgttcaacatgcaccacgactttaaacgtgccaacggttacagcgaactggagatcagccagaagcgcagcatgctggaaaacgtgatgctgaccgattccgtggaaacccataaagcacgcctgcataacgccggttttgagcatagtgagctgtggttccagtgctttaactttggtagtctggtggcattaaaagcagaggacgctgcatgatcgactttggtaacttttattctctgattgccaaaaatcatcttagtcactggctcgaaacgctgcccgcgcagattgctaactggcagcgcgagcagcagcacgggttgtttaagcagtggagtaatgcggtggagtttctacctgaaattaaaccgtatcgtcttgatttattgcatagcgttacggcagaaagcgaagagccactgagcgcagggcaaattaaacgcattgaaacgctgatgcgcaacctgatgccgtggcgcaaagggccgttcagtctgtatggcgtcaacatcgataccgaatggcgttccgactggaaatgggatcgtgttctgccccatctttctgatttaaccggacgcaccattctggatgtcggctgcggcagcggttatcacatgtggcgcatgattggcgcaggcgcgcacctcgcggtggggatcgaccctacgcaactgtttctgtgccagtttgaagcggtgcgtaaactactgggtaatgatcagcgcgcgcatttgttaccgttaggtattgaacaacttccggcactgaaagcctttgataccgtctttagcatgggcgtgctttaccatcgccgtagtccgctggagcatctatggcagttgaaagatcaactggtcaatgaaggtgaactggtgctggaaacgctggttattgatggtgatgagaacacggtgctggtaccaggcgatcgttacgcgcaaatgcgtaatgtctatttcatcccttccgcgctggcgctgaaaaactggctgaagaagtgtggttttgtagatatccgcattgcggatgtgagcgttaccaccacagaagagcagcgacgcaccgaatggatggttaccgaaagcctggccgatttcctcgacccacatgatccgggtaaaacggtggaaggttatccggcacctaaacgcgcggtgctgattgcgcgcaagccgtaaaggtctggtattactgccggatgcggcgtgaacgccttatccggcctacaaaaccttgctaattcaatatattgcagggactatgtaggcctgataagcatagcgcatcaggcagctttacgtttgcataacctcagcgcccgtttccgggcgctattcacgtcttacgcctgaacagctggctgatcaaacgccgttaacttcggtgcattgcccgtatatttttcgatatacaccaacgcactgttaccggcacaggcatttgccagctggctgctggggatatccgccgttaacacgttcgcactgccgtttttacacaagccattttccagatctggccatgcaccttcatgcacgcataccacgccttttttgatcccgtcagtcaccaccgcgcctgtcaaaatctgaccacgtttgttccagacacgcaccagatcgccattcgcaataccaaagcgtgcagcatcttcggtgtgaatagtgattggttcacgatcggcgatcgcatattttttacgcagttccgcatagttaagctgactgtgtaaacggtgtgccggatgtgcggtcagaagctgtaactgcttctcgtcggcggtacctttccattcatcaggagccagccaggttgggtgtgccgggcaatccttatagccaaatttttccaacgttttactatagatttcaattttgccgcttggcgtacccagcgcatttttcaccggatcggcgcggaaatcaccataacgaacgtactgttcgttcttctcgctgtggcgcatttcgatcagtttattttgctgccagaaggcattaaacattggcatagtgacgcgttgcgcacgggcacctttctgagcggcatcatagaaaaatttcagccacgccatttcatctttaccttcggtatagatctcttttccgccaggtttgagtaattccgcaagatcggcaaacacgtcaaaatcgttacgcgcttcaaattgcggagcaacagcctgcttcatcggcacaatatgctggttgctgtaatcaccggtcatcgtcaagtcattgcgctcaaagcttgtggtgatcggtaatacgatatctgcgtgtttggctgctgcggtccagtagcattcagaaacgacgatcatctccggtttctgccatgctttaatcagacgattagtatcctggtgatgggtaaagttaccgccacccgcccaccagatcattttgatattcggatacgtttgttctttaccgttatgctgatatttgccgccaggattttccagcgcatcgacgatacgggcaacaggaatcgccgtcattccgccatcatcagcggcctcgctggcatgtccggcaatcgccgcagacatttccggcagcacgccgccaacacgcgtcgggttgccaccgttggagtaatgataagagaaaccaaaaccgccgcccggtgtaccaatctgccctaacatcgccgccagcgtcaccagcatccagtgtttctgttcaccatattgctggcgctgaattccccagcctgccatcagcattgtgcgattcgccgccatcagttcagcgagtttgactatctgcgcttccggtacgccagtaatttccgccgcccagaccgcgctcttcggcgtattatcgctcttacctgtcagatactcttcaaactgcggatacccggtagtgtatttttcaaggaacactttatcgtgtttgccttgtgtcatcagggtatgcgcaatccctaacatcagtgccacgtcggtgcccatattcggcgcgatccaggtggcattatcgtcaaagaattcgatggtttcggagcggataggatcaatggcaatcactggtttgccagattttttcagctgatggaagtattccagcccttgctcatcggtactgctccaggcaatttttaaggtattcagcgggttcattccccacagcaccacaacctggctgttttccagaatcagcggccaggaggtctgctgttcatacacctctacagaaccgaccacatgcggcatgatcacctgtgctgccccggtactataatcgccgctatgcccggaataaccgcccgccaggttcatataacgttgcagtaaggtttgcgctttatgcaacacgccagaagagcgccagccgtaagatccggcaaaaatggcgcttggtccgttagctttacgaatacgatcatgttgctcatgaatcagttttaatgcctgttcccagctcacctgtacataggtatcttcgccacgacctttcgccggttgcagtggattatcgagatagctttttctcaccatcggatgctgaatacgcgccgtggtgtgtacctgatccgccgccgtagactgtaaggaattcggtatggttttcgccagcgcgcctgtactagaaacaatcttgccgtccttcacttctacgttcatcgctccccaacgtcccgcggtgaggattttaccgcccttctcttctgcccatgcggggagcggtgctgcgcttgtcaccaccagcgctccagcggcaataccgctgtgtttaataaattcacgtcttgttaatgtcataacttcctccctgatcaacgaggatcactgtttctcggtaatatctttggcgttgtactggaaataccgcgttaaaatgtccagttcgttttcgctcatgctggttcgtgcccccattcctttggcaatggacggccacgcattgacggtgtaatggtcggcggcaataggggcatgacaaccagcgcaataggtatcgtcaagtttttcagcgtattgccatagcggtttacggtccgctaatgcgggatcggtaagcgcaccctgtaaagacgcctgacgccattgattgccgtattcgtcagcctgccattccccgtttacagtgagcgccttgataccttcttcacttaatgtggctagcgccagccgttgacctgccgccaggtagagcgtgttttcactgccctgcatttgataaccctgcaacagaacgatcggctgtttgccactggcatcaacgacggtgagatcggttccaggattcacggtagccagctcgcctatgtgagaagttttgaaaggataaatatgtgcgccattagtaacactagtagcggcctgactttccagctcatgcgccgcgttgtcatccatttttatttctggcggaaaatgggcaatgcctttatgacaatcgatacaggtttcgctgtccttttgtgctttgttatgcattttctgcgcagattcactttggctggcaatatccatggcatcaaaagaatggcaactacggcacgttgcagagtcagtggcttttaattctttccatactgtttcggccatttcctggcgatgagcttcgaacttatcgtcactgtctattttgccgctaacaaattcatgataaatatctttagatgcctttaatttagcaaataaataatccatcccactctttggaatatggcaatcggcacattccgcacgtatccctttctggttgctaaagtggacagttccctgatattcctcaaaaggtttactcatgctgtggcaggaaaggcaaaatgctgtatcgctcgttttatgtaagactttttgcgccagcaataacccgccgccaccaaccacaaccgctatcagcaaaaacaataacccaatgcgttttttccctcgcatagattcctctaattaaattactggacaccgaaatcattgtataattaaatatacaacgaattaaccgcttgcataattaggcacaacactgcctgaaacaatcgataaagaatatgatttattacaatgtaatcattaattgctaaggaataacccagttgctatttagaatatatatttatcagttttagtaatttaaatcccataattaatgtgaatatatacaatatttttagcacaacgctatgcgcactgtcacccgctcaacagatcacggttatcgttcgttttttatactgttcagggataaaaaaaggcccctgttgaaattgcaggggcctggtacgagcaagcatcatattgggcgacatgatgcaacggtaaaaatcatttggcctgatggcgttcaatgattcctttcatttcagcaaccgccgccccgtctacgatataacggctatactcgtccgcgtgttcatcactactcatggacaatccttgattacgataacgcatcggactggcttgccacgctcccgcggagctatggacttccagcactccggcatcgaggaagtggtgcaggttttctgcacggactcctgctccggccataatgattggagcatcacgatgggcaataagttccataattttacttaaaccttgcagtgcgtcacttttttgcccacttgtcagtacccgggcaatgcccaattccgcaagattattgagtgtatataaagggttagcgcacatatcgaaggcgcgatgaaaagtcactgccagcggaccggcagcagccattattttttccattcgtggcatatcgacattcccgtcaacatcgagaacgcccgtcaccagtccaggaaaacctaattcgcggaccgtgcgcacatcctcaagaatggcggcaaactcaccgtcgctgtagcaaaaatcaccaccgcgtgggcgaattatcggatgcacagggatcgtcacccgctggcgcacggatttcagtacacccaagctcggcgttaagcccccctcttttggggctgcgcataattcaactctgtctgcgccgttttgctgcgccgttagtgcacattccatgctgtaacagcaaatttccagtaatgccatttttactccttaattacgcgctctgctcgctggcaacgatctcttcaatggaccacggatgaaacttaatagttgttttgccatcggtgaccgccagcgtcggattcggtaatcgctcatgctcaccttttgggctactggttttcacactgatccccggtaggctgagtccttcatcagaaagcaatgccagcgcacgggcattcagcgtttctggatcacccggcagaacgatttcaatatgttcccaaccttcgtgtgggtaacgtttttccccgggccacggtagctccacaatagaaaactgccagtgcgcaacctgtaccggttcatgcaatttaaacagacaaatcggtctgccattgatcatattttcactcaaaagctcgccacactgttcaaacccgcgacgccagcgttcagcagtggcgttttgatggcaacgcaaagaaatgtgatcggcagtcagcggagtgatattcaaccccagacggcgggaaagttcatctaatgcgtggataaatcgcggtaaatcgcttgcaatatcctgcagctcgtcgatagattgccagttcgccataatcactcttcgtctttcagtaaaagcgttaatttaccctgttgccctgtgccaaccaaccgctgatttcacgccgcttctgatgcaatagtgaaaacggcaatacgccacgcgcacgttgctgacgaaaacagccatttgcagtatactcccgccctaatttctttaactggtgcgggcaatttttgctcgcttcatcaatgtaaggtattccggtgaatattcaggctcttctcagtgaaaaagtccgtcaggccatgattgcggcaggcgcgcctgcggattgcgaaccgcaggttcgtcagagtgcaaaagttcagttcggcgactatcaggctaacggcatgatggcagttgctaaaaaactgggtatggcaccgcgacaattagcagagcaggtgctgactcatctggatcttaacggtatcgccagcaaagttgagatcgccggtccaggctttatcaacattttccttgatccggcattcctggctgaacatgttcagcaggcgctggcgtccgatcgtctcggtgttgctacgccagaaaaacagaccattgtggttgactactctgcgccaaacgtggcgaaagagatgcatgtcggtcacctgcgctctaccattattggtgacgcagcagtgcgtactctggagttcctcggtcacaaagtgattcgcgcaaaccacgtcggcgactggggcactcagttcggtatgctgattgcatggctggaaaagcagcagcaggaaaacgccggtgaaatggagctggctgaccttgaaggtttctaccgcgatgcgaaaaagcattacgatgaagatgaagagttcgccgagcgcgcacgtaactacgtggtaaaactgcaaagcggtgacgaatatttccgcgagatgtggcgcaaactggtcgacatcaccatgacgcagaaccagatcacctacgatcgtctcaacgtgacgctgacccgtgatgacgtgatgggcgaaagcctctacaacccgatgctgccaggaattgtggcggatctcaaagccaaaggtctggcagtagaaagcgaaggggcgaccgtcgtattccttgatgagtttaaaaacaaggaaggcgaaccgatgggcgtgatcattcagaagaaagatggcggctatctctacaccaccactgatatcgcctgtgcgaaatatcgttatgaaacactgcatgccgatcgcgtgctgtattacatcgactcccgtcagcatcaacacctgatgcaggcatgggcgatcgtccgtaaagcaggctatgtaccggaatccgtaccgctggaacaccacatgttcggcatgatgctgggtaaagacggcaaaccgttcaaaacccgcgcgggtggtacagtgaaactggccgatctgctggatgaagccctggaacgtgcacgccgtctggtggcagaaaagaacccggatatgccagccgacgagctggaaaaactggctaacgcggttggtattggtgcggtgaaatatgcggatctctccaaaaaccgcaccacggactacatcttcgactgggacaacatgctggcgtttgagggtaataccgcgccatacatgcagtatgcatacacgcgtgtattgtccgtgttccgtaaagcagaaattgacgaagagcaactggctgcagctccggttatcatccgtgaagatcgtgaagcgcaactggcagctcgcctgctgcagtttgaagaaaccctcaccgtggttgcccgtgaaggcacgccgcatgtaatgtgtgcttacctgtacgatctggccggtctgttctctggcttctacgagcactgcccgatcctcagcgcagaaaacgaagaagtgcgtaacagccgtctaaaactggcacaactgacggcgaagacgctgaagctgggtctggatacgctgggtattgagactgtagagcgtatgtaatcgatttttcgtgagagtgaagcctgatcagggttagccgatcaggcttttttattgccatctaaatgtattctgaaaatggacatgccattgttttctcactgttggataagaggccagaagcgtaatatccggccccagggaaacgataacggttgaatttaaggaataccgcagtgtttaaatttcttgtattaacattaggcattatctcttgccaggcttacgcagaagatacggttatagtaaacgaccatgacattagtgccatcaaagattgttggcaaaaaaatagtgatgatgatactgacgttaacgtgatcaaaagttgcctgcgacaagaatacaatctcgtcgatgcgcaattaaataaagcctatggtgaagcttatcgttatatagaacaagtgccacgcacaggtgtaaaaaaacctgataccgaacaacttaacttgcttaaaaaaagtcagcgagcctggctggattttagggacaaagaatgtgaattaatccttagtaatgaggacgttcaggatttaagtgacccttattctgaaagtgaatggctcagttgtatgatcatacagaccaatacgcgaactcgccagttgcagctataccgtaactctgaagatttttatccaagccctttgacaagaggataattcacatctttttggcatgttttgttgcaagctattcctgataaataattgcaacaagacatcgagcctttttcactgagttattaaacatactcgcgagcgcgtcgctacgctagcaagcaaaaatgaaacaggaataatcgaaatgggatgttgcgcacagtcaaaataactcaccgtaaataatcatctgctataaataatcactttcatgcaataccagataagctatttttaaacagacacttaccgcacaacaaactaattaaatacaaagaaaggcaacaatcaacttaatgttaatgaaatgttttacatatattaaccacttgtttaatgcggagaatcagtacactattttcttataattacatttgaaattatatgatcaccgggagtgattgattaattatctttactaataatcagactaatatttacctgtttgaccgagttgggattgcgtcgtttctccattaggagtaaagctttaatgtcacctgaagttcacagaataaggaacaggttatgagctatagcaatattcttgtcgctgttgcggttacaccggaaagtcagcaactgctggcaaaagcggtatctatcgccaggccagtaaagggacacatcagtttaattactctcgcttccgacccggaaatgtacaatcaattagctgcgccgatgcttgaagatttacgcagcgtgatgcatgaagaaacgcaaagctttcttgataagttaattcaggatgcggggtatcccgttgacaagacgtttattgcctacggtgagttaagcgaacatattctggaagtatgtcacaagcatcatttcgatttggtgatttgcggtaatcacaatcacagtttctttagccgagcatcctgcagcgcgaaaagagttattgccagtagtgaggtcgatgtgctgttagttccacttacgggagattaaccgctcttacgcaagctttggaaaggtagcaactttatcgcgctgctggctttccgcgcttcgcggaactatctgctttaggtcgctaatgaagcactcctgccagtggttaatatcgtttttcacgataacgtccagcatttctgcatgacgggaaatacgttccgccaggctcatagtcaatgcacgatccagcgcagctgcaacttcgtcacgatcgtaggggttaacaattaacgcgctcgttaactcgtttgccgctcccgcaaattggctaagaacaagaacgcccggattggctgggtcctgagcagcaacatactcttttgctaccaggttcatcccgtcacgcagtggcgtcactaagcccacgtcagagtagcggaatattttcatcagtaatttacggtcaaaatgctgattcaaataataaagcggcgtccagcctaattgcccgtatttaccattaattcgtccagcttcattttcgagctgatgacgaatatcctgataggcttgcacatcaccacggctcgttggtgcaatctgggtataacgaattttaccatgatgctgcggatatttttccagcaacgcttcataggcgagaaaacgctctggcaaacctttggaataatccagccgttcgacagaaaagatattttgtacgtttttcagttccgctttaagttgcgccagttttggcggcagtggcccggcagcctgtttggctatttctttcggttcaatgccgatcgggtagacttctgttcgaaatgctttgccccaggctgtatggctttttgcgctacgtgtcgtgacgcgggtcaggttagaaagacaatccaggaacgccagacgatcgttttctgtctggaaacccagcaaatcataatcacaaagctgttcaagcaaggtgtcatatgtcggcagcgcgttgaagatttccggtgtcgggaaaggaatatgcagaaagaaaccaatgcgattattcactccccgtttgcgtaattcatgcgcaaatggcaacaggtgataatcgtggatccagataatgtcatcgtcttgcaacagcggcagtaatttatctgccagcaacgcatttacgcgtagatagccgtcccaggcaggacgctgaaattgcaccagatcgagccgataatgaaaagcgggccagagaacggcattggagaattggttgtagtattcgtcaaggtcctgttcgctgaggttaaaagaggcccacgtaatgttaccttttttcaccttttttagcggctgatcctcattccctgtttcaccactccagccaaaccacagtccgcctgcggctttcagtgcccccagtatgccaacggcaaggccaccggcactggcggcgtgctcgtctggtggtgcaatccggttagatactacgactaaacgactcatagtcatcactcctgttatttttacttagatactacgactaaagctctcatagtcatcactcctgttattttctcttttttgttgtaatgcggtggttatcatttcaagccagctccagacatccggcacacccgccagtcgccaacttgcctgagttgcacctgtgccaatttttacactcattccgcccagtcggttaacgactgcgaagccagattcatcggttaaatcatcgcccagaaatacgggcgttcgcccgataaagggagcttcctgcataaaagctgcaattgcctcacctttactggtacctctcggtttgatctcgacaacacactttccctgctgtaacgccatttgtggccagatctgagtaatacgttgcgctaatgtcattaatgcgtcttcatgctgcggagcctgacgataatgcagcgcaaaagccatccctttcgcctccagctccgcgccgggatactgagcgatgactgtatgcagttgcacgctaatatcacgcgcaatcgcatccggcagatgaacgatatgtgttttaccattgatgtcacggcgctccgccccatgcacgcccgctaacgggaagcgataaggttttgccagtgcgtcaagctccaccatactgcgcccacttatcaatgccaatgcaccatcacttgcggttgccagtagctgtagtccttgcagaatattgtcaggcacgacgacctgatcgggatgcggtttgatttccgccagcgttccatcaagatcaaaaaaccaggcatatttcgcggatagttcaggggtttcggttaacggttctgtcacccggttctcctccttctcttttcttattgtgttgcgcagaacgcgctttacagacatgtaagtatagacagtgtgacgggggtcgccatttgcaacgaagaacagccaaccgttatggcggttggctatggtgggaaaaaacgctaaattgttgcagaaaaaagcatcagacagtgcgtttcgctttttgcttgtaacggtcgaagatcaccgctgccagcaggattaagccgcgaaccacgtactgcgcgaaaggagaaatattaagcaggttcatggcgttttccacggtgcctaaaattaagatacccgccaccacataactgatttttccgatgccacctttcagagaaacgccacctaaaacgcaggcggagataacaatcagctcataaccaatgctcgtcattggctgcccactggtcatacgactagccagaataattccggctatcgcacttaccaggccactgagaacaaagataataattttggtgcgaacaaccggtacacccgccagacgcgcggcctcttcgttcccgccaatcgccagggtgttacgaccaaaggtggttttattcagcagcaaaccaaagataatcagacacgcgacggtgagccagattggcgcaggcagaccgaaccagttggcgtaaccaagggcaaagaagctttcatcttcgataccgaccgctttaccgtcactaatgatgtacgccagacctcgaacaatctgcatcgttgccaatgtcgtgatcagagcatttattttcagtttggcgataacaaagccattgaccaggccacagagaacgcccagcaacaaccccgctgccacgccaatccacaggctttcagtcaggttaataaccaccgccgtggtgacacccgcacaggcaattacggaggcgacagaaaggtcaaagtcaccggaagcgaggcagaacaacatgccacaagccaccatcccgctcatggaaattgccaggcccaaccctttcatattaatgaaggtggcaaaatttgggacaaaaatggcacaggcgataaagagcaccgcaaacaccaccagcatgccgtactgatcccagatacgcccgaagctgaaactgctcttaggtgcgccagacccgcttgtagaaacagaagacatcatactctccttactcaggcaacagcctggctgactttaggcatcgcaaggctcagtgcctgacgctcatctgcctgctcgtgtaacaattcaccggcgatttcaccttcccgcatcaccacaatccggtcggcaacgccgaggacttcaggtaagtcgctggaggcaaacagcaccgccacgccctgcgccgccagcgcataaattacgttatatatttcgtgcttagcgccaacatcaatgccgcgcgtaggttcatccagcaaaatgaccttcatctcttcgcttaaccagcggcccagaatggctttttgctgatttccgccactgagattcatgatcagttgctccgcgcccggcgttttgatgttgaggctacgaatgtggtgatcggcattgttttcttcccaaccgttgttgattacacaaccgccgagcacatgtttacgtctggcactgatgttgatattgtcgcgaacggagtgcacgggaataatgccttccgctttgcgatcttccgggcagagcatcatgcctgcggcaatggcgtggctcggtttacgaatatcgatcggctgttggtcgatataaacctgaccggcggtgatttgcgtcccgccaaacatgcctttcattaattcgctacgccccgcccctaccagaccaaacagcccaacaatttcaccactgcgaaccgccagacttattggcgtacgcacgcctggtgctttcacagcatcaagacgtaggcgctcctcgccataactacgcggttgccagccgtagatatcgccaatgtcgcgcccgaccatcgcctgcaccagcgcgtcgtggtcaacctgctgcatatcggtaaaggttttgacataacgtccatctttaaagacagtaatggcatcgctgagggcaaatatttcttccatacggtgagaaacgtataagattacccgcccctcttttcgcagttcacgaataacgcggaaaagattgtcgatttcacgggcagagagggagctggttggctcatcaaaggcgataattttggcgttacgcgccagcgctttggcgatttcaaccatctgccactgaccaatggagagatatttcagcggcgtgtccgggtcaatatccataccaagatgtttaagttgtaaacccgcctcataattcagcaaactgcgattcacaatgccgcctttatgcggcagctggccgagatagatgttttccgcgacggtcatttccggcacgagatgcagttcctggtaaataatcgccacgcccgcgttaagtgctgcggtcgtgtcggaaaaggacatttcctgcccattaatcactacagaacccgtggttggcgcatagttgccgctgaggatttttaagagagtactttttcctgcgccattttcacccatcaacgcatgaacctgaccggcatagcagtcaaaactaatatccgtcagcgccttaacgccgggaaacgttttaccgatgccgcgaaaactgagatacggggtagactgttgcataacgtctccgtgaatcactggtcgttcacaccccctctgcatcatgcagaggggaatttttccggcaaattacttaccgcctaaaccttttttctccagttcttctttaaagttgtcacgcgtgatcagtaccacgtcggtaacttcggtaaattttggcggttcaacgtcttttgctacccagttgtaaagcatttcgctggatttatagccatgtacgtccgggcttggcagcagggaaccgtagaagccggttgcctgtgctttagacagttcgctcaccgcatccacaccgttaatgccaatgccgatgatatcggccgctttaaagccctgaccttccgtcgcgcgtacgccgcccagcacggtgctgtcgttcataccgacgatcagccaatgtttaacttccggatgttgaaccagcatactgttggcagcgtcaaatgcccccgggatgtcgttagatttggtaggtacctgataaatttgtttttccgggaatccggccgctttcagcgcatccatagatcccgtagtacggcggcgggcggtatccagttcgttggcggtaatcgccatcaccgcgctttctttgacatcccagccacgtttctgcatctctttatacagttcctggccctgacgttcgccaattttagtcgccgccatcatcaccagcggaacggtatccattggcttacctttggcgttaacaaactggtcatccacggcaatgactttcatatcgtagccacgcgctttcgcgacgatggcagagccgagtttggggtccggagtacaaataacgaaaccttttgcgccactggcagccaggctgtcgatcgcgttcaatgttttttcgccatccggcacggcaatcttaataacctcaaaccctaaatccttcccggctttatcggcaaacttccattcggtctggaaccacggctcttccggttgcttcaccagaaaaccgagcttcaggttctccgccatagcggattgactcataacggctgccagaccaatggctgccagggctttagtaaatttgtgcatggttctctccagctttagtgtcgttttgtgtagggcaaaaacgaatgacattcgttaaattaatcggaaaacaaagcattaccttttaactaaaagataagtgactgtgttgacatagttttagcgagaaattaattctccataggagagcaatatcacatcgcagaattacagtgagaacgtgcataaatttagcgggaaaagacataagggaaagccaatttgtcagacaaattgtcgaatgcacagcagattaatccataagattagcctggaaatccttgttgtctttggtacccatgcgggatgtcttctttttaaccagtcaataggccgcattacctggcgttgagtttttgaaatggtgtaataaccgcaactcaaagatgtggaaaatgcacgtcattcatttcgtcattaattatcactgtgctcattaattaacagaacacgtataatgagagccatctcgcaaaaatgaaaaaacgttttataaaatcatcacttcatcatgaattcaaattcattgattaatatcaacaagatacaaaaagcactatcattaaaattcattgcagttacattgatttcatcaatgaaatgtaaaaatatataaacttgatgatttaagcattttcttatacccgttcagacgttattcttatttcagatcatcgtcagaattgactccacgatcacatttcggaccggcagaaaggaattattctgcaaacagtaattatggtgttttgatttatcttgcacctctccacttctggatataaggatattaggtatggcaaccgctggaatgcttctcaaactcaactctcaaatgaaccgcgagttttacgcatccaatctctaccttcacctgagtaactggtgttctgaacagagtctgaacggcaccgccactttccttcgcgcccaggcacagagtaatgtgacccaaatgatgcgcatgtttaactttatgaagagtgtcggcgctacccccatcgttaaagccattgatgttcccggtgaaaaactgaactctctggaagaactgttccaaaaaacgatggaagaatacgagcaacgttctagtacgttggcacagttagccgatgaagcgaaagaactgaatgatgatagtaccgtcaatttcctgcgcgatctggaaaaagaacagcagcatgatggtctgttgctgcaaaccattcttgatgaagtgcgcagtgcgaaacttgcgggtatgtgccctgtgcagaccgaccaacatgttctgaatgtcgtgagtcaccagctgcattgatcatcatcggcgctaatgcattgcgccgatgaaggttttgagaaaccgctgcctcatctgtttgaagcagcggtttttttaatgggattcaccctgtggggtaaacttgagttcaataagcgcgatggctttttggattgcccgcatggtgaccgggtctgcggcggcgggatggttagtaaagtcgatattcttcagctgactggacattttttcacgaacttcaacgggcgcgattacatcgagaacatccagaatttgtttgataaccaactggcaagcaaccacatcagaaaccaattcctgatcggcattcagcggctgggacatcgtaaactcctgatagcattttgaaagccgttatagtagcgacttcacatcttcagcgatagtcacatccaccgtcatcaggacacaaaaaaacctgccggagcaggttttttgttatcggaacatattgcctggcggtacgtctttgaacgtcttgcaatagttattgaacatacttttcaggattttgcgcagtttcatcgcggcactccgaccatttgttatacaggtgttattgtctttgcgcttataatatgacaaccatcacaaaaatcaatctttatgtgatacaaatcacataaatacccctttaatgttataaaaatgataatcaaaaaacagcccccctatttctgacacctacagatggcaagaaatagcgcctgccaggcgtcttttccggccattgtcgcagcactgtaacgcgtaaaatagtgctttctcttactcttctggctggaccatgagacttctgattctgactcttagtttaataacgctggcggggtgtacggttactcgccaagcccatgtgagcgaagttgacgcggcaacaggtattgtacggttagtttatgaccaggcttttttgcagcatgcccataccgatcgttatgtcagtcgcgggatcgccgatcgcgcatgccagcaggaaggctatacccacgcggtcccctttggtcagccagtaggcaactgtagcctttttgcgggttccttatgtttgaatacggaattcactttgagttatcagtgccatcattccgccttccctgtctttctctaaatattttaatcagcgaggggatcttcgctgattaaagaaatagcggtaatgcgttttattcccattcgtatttttaataattgaagtttatattttaccttttgcaaataataaaataacaaattatagtgacgccacagcaacaaatataacctttgtggagcactatcatgctgaaaccagaaatgattgaaaaacttaatgagcagatgaacctggaactgtactctagtctgctttatcagcaaatgagcgcctggtgcagctatcataccttcgaaggtgctgccgcgttcctgcgccgtcacgcccaggaagagatgacgcatatgcagcgtctgtttgattacctgactgataccggcaatttaccgcgtattaataccgttgaatctccgtttgctgaatattccagtcttgatgaattattccaggaaacctataaacacgaacaattaatcacccagaaaattaacgaactggctcatgctgcaatgaccaatcaggactacccaacatttaatttcctgcaatggtatgtttctgagcagcatgaagaagagaaactgttcaaaagcattattgataaattaagcctggcaggcaaaagcggcgaaggtctgtattttatcgacaaagaactctctaccctcgacacacaaaactaatgctctccggcggcaggtttactgccgccgtttcaaatcagtgacggcaaatcttactctgatcggtgctaaaaccgtctttgctaggtataaatttgccttttgctgccagaaacgctaccagctctcccgctgtcatcccttctgcgctgcaggtgtgaaaacgtgcctgttcaccaaaacgcgctttaatcgcagcttccagactggcatgcgtatattgctcgccactttcaatcatcatatttaacacttcatgaccgtgaatagagtccatcgtccctcctcaaaaaaagcctagcgtagcgattgccgcttatgaagactttgcgccagcgcaggactgaatgctttttattgtacatttatatttacaccatatgtaacgtcggtttgacgaagcagccgttatgccttaacctgcgccgcagatatcactcataaagatcgtcaggacagaagaaagcgtgaaaaacagaaccctgggaagtgtttttatcgtggcgggaaccacaattggcgcaggcatgctggcaatgccgctggctgcggccggtgttggttttagcgttacgttaatcttgttgattgggctttgggcgttgatgtgctacacggcgctattactgctggaggtgtaccagcatgttccggcagataccggtctgggcacgctggcaaaacgctatctgggacgctacggtcaatggctgacgggcttcagtatgatgttcttaatgtatgctctgactgcggcatacatcagcggtgccggtgaattgttggcctccagcatcagcgactggacaggtatttctatgagcgcaaccgctggcgtgctgttgttcacttttgttgccggtggcgtggtttgtgtcggaactagtctggtcgatttatttaaccgttttctgttcagcgccaagattatttttctggtggtaatgctggtactactgctgccgcatattcacaaagtgaatcttttaaccctgccgttgcaacaggggctggctctgtctgcaatcccggtgatttttacgagctttggttttcacggtagcgtgccgagtattgtcagctatatggatggcaacattcgtaagctacgctgggtgtttataatcggtagtgcgatccccctggtggcatatattttctggcaggtggcgacgcttggcagcattgatagtacaacctttatgggattgctggctaatcatgctggattaaacgggctgttacaggcgttacgcgaaatggtggcctctccgcatgttgagctggcagtgcatttatttgctgatttagccctcgccacgagttttctcggcgttgcgttaggcttatttgattatctggctgatttatttcagcgtagtaataccgttggtggacggttgcaaactggtgcaattacgtttctgccgccgttggcgtttgcactgttttatccacgaggatttgtgatggcgctgggttacgccggtgtggcgctggcggtactggcattgattatccctagcctgttgacctggcaaagcagaaagcacaatcctcaggcgggttaccgggtcaaaggtggtcgtccggcgctggtggtggtgtttctctgtggtattgctgtgattggcgtgcaatttttgattgcggcagggttgttaccagaagtggggtgatcagatagcctcaaattccttattgggtgccagaattaacgctgacacccaatttggcctcttaatgcaggcagcactgcttaaatttcttaccactaccgcacgggcaaggatcgttacgccccggtttctcttctgctttgatcggttgctgaacagctttttcctgcggatgcgccatccagtacgcatgtagatcaagcgccgccagtcgaatggcatctacgctctcttcaaacgcttctgggctcatcttttctacccgctcgaagttttcctcagtaccgtgcagcgcaatcgcctccagcgctggttttaagctatcgggcaacgtactccagtcagaaagtgccacgccccgcatatagccaaagcaccactcctcaacaatcgtcagctcgctgccatcaacttctcgcaagccgaataacggctcaaactgctccgggaattcgttcagacgctctgcggtatcggccatatgttgaaaagccagattcataaagcgcgtcatctctttctcactcgcccagcgcggcacatagtcagccccaccccacacggcaaccagccactgttccggttcaatctcttgcggagaactcaacaccgccgtcaataaaccgtccagctccgccacatcaaggatggcgtggtcagtgttgtatttggtcagaatatcgtccagccattccaactcactttcgtttaacggtcccgttttcatacgcttttccttgtggatctcaactcgccagcacctatcttacatgccggtccgtatcagagatactttttgagtggctttgctggtgattaaaaattaaggagggtgtaacgacaagttgcaggcacaaaaaaaccacccgaaggtggtttcacgacactgcttattgctttgattttattcttatctttcccatggtacccggagcgggacttgaacccgcacagcgcgaacgccgagggattttaaatcccttgtgtctaccgattccaccatccgggctcgggaagaaagtggaggcgcgttccggagtcgaaccggactagacggatttgcaatccgctacataaccgctttgttaacgcgccaaattcttcaggcctttcagccagacatccgcttgacgccgatgtcttttaaactggagcgggaaacgagactcgaactcgcgaccccgaccttggcaaggtcgtgctctaccaactgagctattcccgcattcatcaagcaatcagttaatcacttgattttattatcgtctggcaatcagtgccgccgttcgatgcgttgcattctacttacctggcgcgatgagtcaacgatatttttcaccacttttgatcgtttgctgaaaattacgccgaaacgatcactgatcaagcaaatctgcacgcgcagcgctcaaatattgcaacatactccacagagtcagtaccgcagccacaaagaaaagtgcaataccggcgtactcaacccaaatgttcggacgccacagcagccatgccaacgccaccatctgggcagtggttttcactttcccaatccaggagacggccacgctactgcgtttacccaactccgccatccattcgcgtagcgcagaaataataatttcacgggcgatcatcgttgccgccggtaatgtcacccaccagctgtgataatgctcggttaccagcaccatggcgatagccacgagaactttatctgccacagggtcaaggaaagcaccaaaccgggtactctggttccagcggcgtgccagaaaaccatcgaaccagtcagtcaccgccgcgacgcagaaaatgagcgcggcggcaaacgggctccaggtgacaggcagataaaagaccaatacaaagaatgggataaggatgacacggaacagtgtaagcaacgtagggatattaaattgcataatgacgggtaactatctgttgtcagtaagattacccctatgttgctacagagacatcaatgtttcaagctccagaagatcttttctgccagaccttggctaatacccggcacttttgcaatttcctcgacgctggcgttacgtaaaccttgcaaaccgcccatatatttcaacaacatttgccgacgttttggcccgacgccttcaatggtttccagggaactggtatttttgaccttcgcccgttttttacggtgcccgccaatcgcgtgatcatgactttcatcgcgaatatgctggataacatgcagcgcgggactatctggcggcaaactaaatccctcaccttccggctcaaagaacagcgtttccagtccagccttacgatctgctcctttggcaacgccaagtagcagcggatgatttttatcccaactgacatccagttcggcgaagacatttttcgcctgcgcaagctggcctttgccgccgtcgataaggatcacatccgggatcttactgtcgtcaatggctttaccataacgccgacgcagcacctgattcatcgccgcataatcatcgcccggcgtgatgcctgtaatgttatagcgccgatactccgcacgcagcgggccgttagcatcaaacaccacacaggaagcgacggtttgttcgcccatggtatggctgatgtcaaagcactccatccgcttcacttccggcaatttcaacacgctggcaagcgcggtcagtcgctggtgaacggtagattgctggctaagtttgctggttaaggccgtcgccgcattggtgcgcgcgagtttcagataacgcgccctatcgccgcgaggtttggtttgaacattaatcttgcgtcccgccagttcactaagggaatcggcgagcagcgttttatcgctaagattaaaatcgagcaggatctcacccggtaaggtgcgcatctggctgccttgtaaatagaactggcctacgaaggtttctaccacctcgctcagttccgtaccgccaggcactttcgggaaatagctgcggctgccgagcactttgccctgacgaatgaacaatacgtggacacaagccatgcccgcatcgaacgccacaccaataacgtcgaggtcgtcgccggtattggaaacgaattgtttttcggtgacgcgtcgcaccgcctgaatttggtcgcgaatacgtgcagcttcttcaaactccagattctggctggcagtttccatacgactaatgagttgcgtaagcacctgatcatctttgccagacaaaaacaggcgcacatactcgacctgctgagcgtattcttcttcactcaccagtccttcaacgcacggtcccagacagcgccctatctggtattgcagacacggacggctgcgattgcgataaacactattttcgcactggcgaatggggaaaatcttttgcagtagcgccagtgtttcacgtacggcatagccattcgggaacgggccgaaatattcacctttggcatgcttcgcaccacgatgcatcgccagacgcgggtgggtatcaccactcaggaagataaaaggataacttttatcatcgcgtagcaaaacgttgtaacgcggctgatagagtttgatgtagttgtgttccagcaacagcgcttcggtttctgtgtgagtaaccgttacatcaatttgctggatctgggcgaccagcgcttcggttttgcggctagcgaggttgctacggaaatagctggaaagccgttttttcaggtctttcgctttgccgacatagataaccgtaccaccagcatcgtacatgcgataaacgcctggctggctggttacggtttttaaaaacgcttttgcgtcaaactgatcactcactgactacttaatgtctccgcattacacagaccatggcgaattgccaggtgagtcagctcaacatcgccatgaatgtttagtttactgaacatacgatagcggtagctgttcaccgttttcggactgagattgagctgttcactgatctcattgaccttctggcccttggtgatcatcagcataatctgcaattcacgttcagacaaactggcaaatgggctttctgttttttctggttcgatctggcttaacgccatttgttgagcgatgtcagaagcaatgtaacgctgcccactatagacagaacgaatcgcactcacgacttcctgcggagccgcgcctttgctgaggtagcccgcagcaccggcctgcatgactttcgctggtaaagggttttctgtatggacggtaagcatgatgattttgacatcagctgtggaacgcgcgattttacgcgtcgcctcaagaccgccaatgcccggcatactcatgtccattagcaccacgtcaacggcatttgtccggcaccacttaacggcgtcttcaccgcagcttgcctcaccgacgacttttataccctttatatcttccagaatgcgtcgtatccctgcgcgcaccagttcgtggtcatcaacaagtagaacgttgatcaaaggaatatctccagaaatagggataacgctactgatagttagtcattcgtatattagcggtttttattgcaactttgaaacgttaaaaatggtgggtattcgatttttctctcgtttttgtcaattcgattgtccacagttatggtcacgcccgtcaccaacggcttaccggatcgtttcacagtaagccctacgatgaaatgtgacaaaaattgactttattcagcaaaaatgaaaatcagcccgctgaatatgtaacattaattaacccgaacaatacgggcaaaaaacattcatgataaaaatatttattggtcattatattaacgtattttatagcactgccgatatcacgctcaaaaaacaaccactgctatttttagcaaagcttatggtatactccgccgccttaacatttttcaccgcaaattttcattgcaacatgacgaggaaaataaatgagtacgcctgatttttctactgccgagaataatcaagaactggcaaatgaagtctcctgcctgaaagcgatgctgacgctgatgctgcaggcgatgggacaagctgacgcgggccgcgtgatgttaaagatggaaaaacagcttgcgctgatcgaagacgaaacccaggctgcagtattttccaaaacggttaagcaaattaaacaagcctaccgtcagtaatataaaaccggctgatagcgtgcctttcagccggtttttgcatctggcacgcaggacagaaaagagatcaaattaagccagtagcggccgcgtaacaggcaacctgggtcttatttggtgcattaatttttttctgcatgtttttctggtggaaattgaccgtattctcagagatactcaaaatcatcgctatctctgcacttgttttcccttccgccgtccacctcagaatttctttttcgcgcttgctgaaattcatctctggcgtcatcactatttcatcatttaaacgcatcagagccatcagactttcgcgcaccagtaactgcatttttaattgcagttcatcactaagaatgggtatttcgcgcgcgctgcaacgggaaaaggacaaaaagcccagcgcccggtttggcagcattaaatactgagtgacaccgcggcgtaaaccatgtgcgcgcgcggcttcccataacggctgtgcttcgctgaataagtcatcattccacattaaatggccctgactaaagttttcagggttcagcaccggatcaattgcgagaaagttttttgcctgataataactaacccacgcctcagggtaattggtgtaaaaagccactttaggtcgagtgaatggtaccgggtggcggacacataagctatagtaatcgtactccagctgctgagcctgaagctcaatttcatggtagacctcttctgcggtctccatcctctgaaaacgcaacagcatcgtgcgacgccagctgaaaaaatccttatcctgcatagtaaaccgcaacgcccttgagagtgagtatcatttataatgataattcaaactatcacataaataagatttatatataatttatattattcaggcaatgaattacttttgcaagccatcgcattctcttatgttattaatgagttatgctgatttgttaagcagttttatcaggcttgaaatggcgtccagccccgacaggtgaatcgtcggggctgattttttcttattattgcagcagaaacttctcgaggaactggcgggtgcgaggctgctcggttccgtaacgtttatcatgttatcctaaggattatccgaaaaataatacctacgaacatcttccaggatactcctgcagcgaaatatttgttttaagctcactcacatatcgcaacatttactttactttaagacaattccaggcaaattatacaacactttacgggatagtaagtccgcctgaaaaatcgcgagagtggcgcattaggtgacccatgttgttccgtttagtcatgatgaaatattcaggtaaggggaattatcgttacgcattgagtgagggtatgccatgagtacgattattatggatttatgtagttacacccgactaggtttaaccgggtatctgttgagtagaggggttaaaaaaagagaaatcaacgacattgaaaccgttgatgaccttgccatagcttgtgatagtcagcgccctagtgtggtgtttattaatgaggactgtttcatccacgatgcttctaacagtcagcgtatcaagctcatcattaatcaacatcccaatacgttatttatcgtttttatggcaattgccaatgttcattttgatgaatatctattggtcagaaaaaatttattgatcagttctaaaagcattaaaccggaatctctcgacgatatccttggcgatattctgaaaaaagagacaacgataaccagctttttaaatatgccgacgttaagtttgagccgaaccgaaagcagtatgttgcgaatgtggatggcaggtcagggaaccattcaaatctctgaccaaatgaatatcaaagccaagaccgttagtagccataaaggtaatattaaacgtaagatcaaaacgcataataaacaggttatctaccatgtcgtccgactgacggataatgtgactaatggtatttttgtcaacatgcgctaacacattctgactggtggtttcccaccagtcaggctgaataagattactctgctttctccacaaagataccgtcctgatgccctgcttcattaaagaaccagatgccgagcgggtagtcttccaggctaaccaggtacattgtgccttcactaaactcctcaactgccagtaccacgccaggacgacgcggaccgccatccgttttgactgttacccgatcattcaccttcatcgttttcctcctgtggctttgtgccagtgtagaacaatttcgtttttctggcagcgccaggcgcgcgcgagtgctgattttctcgacggtctatacttaagagatgccaggcggacttaacgactggcggcaacaacagagtaacggttgcgaggaaagatgatgaaaaccgcaaaagagtacagcgataccgcaaaacgtgaggtcagcgtcgatgtcgatgccctgctggcggcgatcaatgaaattagcgaaagcgaagttcatcgcagccagaacgattctgaacacgttagcgtcgatggacgtgaatatcatacatggcgtgaattggcggatgccttcgaactggatattcatgacttcagcgtctctgaagtgaatcgttgaatgcacaataaaaaaatcccgaccctgagggggtcgggatgaaacttgcttaagcaagaagcacttaaaaaattcgttacaccaggaaatctgatgtgttcatcaccttatccgcaatttttttcgctgacaagaaaatattcgccatatgaatgattaacgctacttatgaatagaaatgtgacgcacgtcaccccttggtggctctggcgtcagcgggatcgctcccgaaaaaatcatctttgataatttgtgcggttttgagaatcatcctggtaagaggagtactgcgcgactatgtttagtattcaacaaccactactggtttttagcgatcttgatggcaccctgctggacagtcatagttatgactggcaaccggcagccccctggctcacccgtttacgcgaagcaaatgttcccgtcattctctgtagcagtaaaacaagtgcggaaatgctgtacttgcaaaaaacgttggggctacaaggtttaccgctgattgccgaaaatggcgcagtgatccagcttgctgagcaatggcaggagatagacggttttccacgcatcatcagtggtattagccatggcgaaatcagcctggttttaaatacgctacgcgagaaagaacattttaaattcacgacttttgatgatgtcgacgatgcaaccatcgccgaatggacgggattaagccgtagccaggcggcgctgacgcagcttcatgaggcgagcgtaacgctaatctggcgcgacagtgacgagcgtatggcacaatttaccgctcgtctgaacgaactgggcttacagtttatgcagggtgcgcgcttctggcacgtactggatgcttctgccggaaaagatcaggctgccaactggattatcgcgacctatcaacaattgagtggcaaacgcccaaccacacttggcctgggcgatgggccaaacgatgcgcccttactggaggtaatggattacgcggtgattgtgaaagggctaaatcgtgaaggggtgcatctgcatgatgaggatccggcccgcgtctggcgaacgcagcgtgaaggaccggaaggatggcgtgaagggctggaccattttttctccgcccgttaagcgttatcgctcgcgaatacccgattacgcccagcctgtttagcgagataaagccgacggtcggccagactctggagttgttcaaaatcataatcaccggtttcctcgctgctgcttacccccaggctggcactgatgcgtatcgtcgtactcttggcgatcaacatctctttttcatttaatttcagtcgaatacgttctgcgacctccgcagcctccgtcagactcgcgcctggcagaatcacacaaaactcctcaccaccgacccgcccggcaacgtcctgcgcacgcaaggaactgctaattaatccggcagcatgagaaagaacacggtcgcccgcctgatgaccaaagcggtcattaatcgctttaaaatggtcaagatcgacctgaatgacagaaaaaggatgttggtgcgtctgacacaatttagcgagcggacgggctttttcgaacagtgcgccacggttatataaacgcgttaaggtgtcgtgccacgcctgccactgcaagctgctttgcagaacatacatgttgctaaccatccggcgaatcacataccaggagatgagtaacatggtggtaaagagcgcccacagcagggttaatgcaatgctgatactgccgaaatcgccgcgcacgccttcgcttaacgtatggacacgcaccagcacaccgtcgaaatggtccagacgttcccagctaacatagcgactgtccatacgaatgccgccccgcgtgtcatgttccattgcctgcgccagcaaggccagttcacgaggatcaaaaatattccctgttggatggtcaggattggaagaggtcaaaaatctcagcttactgtcatagagctgatactcaccatcgaggtttttatcgatggcgtttcttaaaaattgctgcatagtacgcacgggaatactcatccccagcacgccataccagtagttattactgtctaccggaacactgacggtaacctgcggttcagtattgctggcgtgttccggttggctagtgaaccagcgtaccgcgcggtgacgattttctcgttgactatggccaataaaccagggttgggtgacatagccgtaataacgcgttggaacattgcgcgtaaacaaggtcggctgcgtgctaacgtaaaatccggcacggctgacatacatcgcctgttcaaccatgctgctggagttgtgcgctagtcgcagcaagtaaccaacttccagtgcagcggtaatttcattgtcgaggctttcattttcgcgagacaggagattcccctcgctgactaatgcatcgctcacaccattaactggcagagtgcgtcgtcggttgagttcgattttccaggcgtgctcgtcgcgatgctgttcgaactcggttacagcatcacgcagagaggtgaaatccagtggcgctacgagagcttcgcgcatgccattacgtaaaaagatcagtttgtcgacgttatactgcaaatgcttatcgagcgcgttggcaacgttttccagatgattacgctggctggagatataggcatcttccagcaccaccacttcacgccaggtgagcaaggtggaaaaaagcaataccacgataaagcagagattaacgacatgaccaggccccaggcggcgtgcgagttttttcaaccagctctggttttccatttttgtctcgtgctgcaccctgacgactcccaacctgcttttttatgattctggcataacctggcgatagcgtaccgcaaaacagcgataattttataatggtggcatgataagacgcgactatcattcattgcaggcattagcacaccaggccggatgtgatccggcctgatgttaatgataccctttcacacttcttccgcagaacgactcccctcccccggaacaagctcggtttcatgaaaagcttcccgcttgaccccgtaaccgtcataccaacgacactcaaccataccgctggagtatccagtgacaatcatccgcgggccgccctctttaaccgtaacttcctcactaaccataaagctcatactcgcctccttttttcgagtgaaacttgttcaccttagttgaagatggcgaattttgcataatagccagtgcgagtattaatgtgcctgaccgcgcattttctctacggctttcactcccagcaccacgatgccgccgatgataaatccaagaatcagatttaaaacagtcggtaatatcatcgccactactgcactttgctgcccggcgaaatgttcaatggcgtgatgcagcggcgcaattccatgtaccacaatcccaccgccgacgaggaacatcgccagcgtgccgacaatgcttaacgctttcatcagccagggcgcgataatcaataaccctttacctaatgcctgcatcagcgcgctggatttttccgccagccaataccccaggtcatcaatcttaacgataacccctaccagaccgtagacgcccacggtcactaccagcgcgatgccactaagcaccagcacctgattaagcaacggcgcttcggccacaatccccagcgtgatggcgacgatttccgcagacaatataaaatcggtacgaatcgccccttttattttgtccttttcaaacttcagcggatcctgcgccgccagcttctccagacgctgctggctctgcgccggatcttctttatgtttacgcgcctccagcatatgcagcactttctctactccttcaaagcagagaaacgcgccaccaatcatcaacagaggcgtaatcgcccacgggataaacgcactgatgatcagcgccagcggcaccagaatcactttattaatcaggcttcctttcgccacgccccagaccacgggaagttcccggttggcccgcacgccactaacttgttgcgcattgaggcttaagtcatcccctaatacaccggcggttttcttcgccgccagtttgcccatcacggagatatcgtccagtagtgtggcgatatcatcgagcaacgtcagtaaactactcccggccaaaagcattccctctcatttttattgttgaagggtgtaagtatgaagcaaaaacggcagctctgatacttgcttcacaggtcaacatttttttaacaatcaagtgcaattatatctctcgccagcagaatgattttcacgtttactatgaaccacctttttatttccaccgtgagggattatgcgtttccgccagttgttaccgctttttggcgcgctgtttgcgttgtatatcatttggggcagtacctattttgtcattcggattggcgtggaaagctggcctccgttaatgatggcgggcgttcgattcctggcagccggtattttattgctggcatttttgctactgcgcggacacaaactccccccgctacgtccgctgctcaatgccgcgctgattggcctgttattgctggctgtcggtaatggcatggtgacggttgccgaacatcaaaatgttccttccggcatcgccgccgtagtggttgcaaccgtgcccctctttaccctgtgcttcagccgcctgtttggcattaaaacgcgcaaactggaatgggtgggtattgccattgggcttgccggaatcatcatgctcaatagcggtggaaatttaagcggcaatccgtggggcgcgattctgattttaatcggcagcattagctgggcgtttggcagtgtttatggcagccgcattaccttacctgtagggatgatggcgggtgcgattgagatgctggcggcaggcgtggtgttaatgatcgcgagcatgattgcgggtgaaaaactgacggcgctcccttcccttagtggcttccttgcggtcggctatctggcgctgtttggtagcattatcgccatcaacgcttatatgtatttaatccgtaatgtcagtccggctctcgccaccagctacgcttacgttaacccggtggtcgcggtcttgctgggtacgggactgggtggagaaacactgagcaagattgaatggctggcgctcggcgtaattgtcttcgcggtggtactggtcacgttgggaaaatatctcttcccggcaaaacccgtagttgcgccagttattcaggacgcaagtagcgagtaatcaagcgagtaaatgaatcccctgcgtgtcgatctgcgcgctggcaccttcgccgcagatccactcttccagacgctcggtaagcgcttcatccgtcagcttctcgcgcccacgtaacgcgcactcccagacaatcaatacgcgccagccgagttcctgcaagcgactgatatcgcggcgatcgcgctcaacatttttacctatcttctccagccagaactcggttcgagtcgcaggcactttaaacagatagcagtgatgatgatgccagaagcagccatgggtaaatatcacgcagcgatattcatcaacgacaaaatccggacgtccgggcagactggcgtcctgaacgcgaaatgccaggccctgcccggttaacagactggcgaggcgcttctctatcgccgtatcacgcgtggcaatcgcgcgcatatttttgctgcgagtggccttatcgtgaacgtcggccatgttgtgcctcttgctgacgcttagttatcgactacgtcggccatgttgtgcctcttgctgacgcaacgccaccgcctgtttgatttttggctcaagcagttttgccaccgcggcaaagaccggcacgaccacgctgttaccgaactggcgataggcctgagtgtcgctaaccggaatacggaatttcgcttctcccggcgcttcaaaacccattaagcgcgcgcattcccgaggcgttaaccgacgtggacgatgttgctgattcagcggatcgtcaaagtctttctcacccgtggccatatcccagccgcgatcgattaaaatttccgcgccatctttgtaataacgcgcagacagcgtacgcgtgacgctttgcggattgttcggataaaccattccataaccgaagccgttaccgcgcgcctgatgttttttcgcatatcgatagaggtacttccacagcaccggcgtcaggatatatttcgcctcgaccatcgggtccaacagctgcgccagcgtcactcgctgcgcagggaaacattcgctgatatcacgcagggtaaaatcggctttcagattcagatcgcgacgaaaacccaccagcacgatgcgttcacggtgctgcggcagaaaatgtttgccgtcgatgattttcggatcgtctggcccattatcttctgcatcagccacgtcatagcccagttcgtccagcgtctgcatgatgatgcggaacgttttaccctggtcgtgacttttcaggtttttgacgttttcgagcacaaacatcgccggacgacgcgcgtcgataatgcgtaccacatcaaaaaacagcgtgccctgggtatcgcaggcaaaaccgtgcgcccgcccgaggctgttctttttgcttacgccagccaggctaaatggctgacaagggaaaccggccagtaaaacatcgtgttcaggaatgtgttgacgaatatgttccgccgccgcctcatcactcacgccttctttatggctgagggtgatgtcgcggatatcttcattaaaatgatgcgtcgccggatcgcaataatggttggctttataagtgcgtaccgcatgtttgttccattcgctggtaaacacgcactgtccgccaatgctttcaaaaccgcgacggatgccgccaattccggcgaatagatcgataaagcgaaacgcataatgcggatgatgtgccggtggtttgggtaataacgtttgcagatgggcgaactctttctcacttaaacggtgccatgcgctgtcattcgccagcgcacgttttaaaattgccgcgctccagtgattctcacctacaccattaagctgcgccaccaacgttttaacatcataaatttgcagcagtttctccagcattgcctgtgcggcattcccggtgctgtaactatcggttacacttatattttcctgcatagatttcaccggccatctgagatggccgacaggttaacataattacagccatttagggccacgcgctcagccagcggaactaaacgcatctatcaccttgtgatcgacaccttcattctcccccgccagttcggcactgagcttcgccataaactcgactaaaaaatgcgcgttgtgctgcgccagctgcttgcctcttgcggtttgcatggtttgcggtagcttcagcaacttagtctggaaatgatccagcgcgtagcgtttatcatcaagcgggcgatgctgtgcgaacggatcttcaccatcaaacagcgccacgcccaatgccccactaacggcaaacacgcgcgccaggccaatcgcccccagggcttccagccgatccgcatcctggacaattttagcttccgttgttaagggggcgatttgcgcgctgaaactgtgagcggcaatggcatgacaaacggcctcgattttctccgccggaaattgctcgaactcttcacggagcaggcgacgcgtctcttctgccgccaggatactagaacgctgcctttgcggatgatttttcgccaggctcacaatatcgtgaaaataacaggcggttaaaatcaccagcatatcgacatcgtcatctgccgccagcttctgtgccgtagcccagacgcggcgaaaatgacacacgtcatgggccgcgtcctggtgctgatgatggtttttcaaccagttttcgaactgtgcctgccagtgttgtaagtccatacgcgctccgttgccaaagagtcgccaccttagcagtttttattcatagcgtctgctacgtgcgggacgaggtcgggtgtaccaggcaatgctgcctaacaatgccccgaccagagccataaataaaaatccgaccagtgcccctaaccactttcccgcggtagagcctaaatcgctttcaaatccgctcacgggggcatcgggaatccggctcatcacccagatgtaacgcgccattgcccagacgaaatagccacaccatgtatagaaagcccacaaagccagtttgccgccagggctgcgagagagtctctcttccatctttgtgctaccgtattccattttgagataacccggaaaattcagacttagtactattatgtgataaaagtcacatttttccacattggatgagccagtcaagactcaatcattttttgaacaaatagataaattttgcgcaacggcagtgaatacaggaaaaatcgttttgagcgattttatttatctttgatatcggctttattaattcatttaatcaatatattagcactgattacaattatacctttttattattctgtgtcatgatgcttccgttattagccttttatcgtcttgtttatattttttgggccggcatgatgccggcttttttttatgccttcattaatgtgcgcctgatcacaccagccgtttggcgcaacaatcattgataccccctatgtttccgctcaactcataacatattgatatacatttataattttcatgaatatttatatttagaattcataattatgaattatattaaatagattagaaacattttgatatcttttaaatacatttgttacatgtaatccttaaaataaaatgaacttcatagaatagtatccaaatgtgcttttttttggataacggcacttattgatatattcatgaagattataatcacaagggaatacataatgaaaagaaaagttctggcaatgctggtcccggcgttattagttgctggcgcagcaaatgcggctgaagtctataataaagatggtaataaactggatttgtacggaaaagtagtgggtctgcactacttctctgatgattctggcagcgatggcgacatgtcatatgcccgtatcggtttcaaaggtgaaactcagatcgctgatcaattcactggttatggtcagtgggaatttaacattggcgcaaacggtcctgaaagcgacaagggtaataccgcaacgcgtctggcatttgcaggtttaggctttggtcagaatggtactttcgactatggtcgtaactacggtgtcgtatatgacgtagaagcatggaccgatatgctgccagaatttggtggcgatacctatgctggcgctgacaacttcatgaacggtcgtgctaatggtgttgcaacctaccgtaacaatggcttctttggttaggtcgatggcttgaactttgctttgcaatatcagggtaataatgaaagtggtggaccattcgggcaggaaggttccggtagtggtgatggccgtagcctttccaaagaaaatggtgatggtttcggtatgtcaacatcctacgacttcgacttcggtttaagtctgggtgctgcatatcaaactctgatcgttcagatcgtcaggttggagttggtttaaatgatcgtaaccatagcaacagaaatgctggtggtgaaaccgctgaagcatggactgttggtgcaaaatatgatgctaataatgtgtatttagcagctatgtacgctgaaactcgcaatatgaccccatatggtggtggcgagtttgataatggtgaatcaagatcagccatcgctaacaaaacccaaaactttgaagttgttgctcagtatcagttcgactttggcctgcgcccgtccatcgcttacctgcaatctaaaggtaaggatttaggcggttgggctcatgacggcaacggcgacccacgttacaccaataaagatctggttaaatacgttgatattggtgcgacctactacttcaacaaaaacatgtccacctatgttgattacaaaatcaacctgctggacaacgacgatgacttctacgaagcaaacggcatcgctaccgatgatatcgttgctgtgggcttagtctaccagttctaatcagtcaactcgctgcggcgtgttactgtaaaactgaacactagcctgagttcgtccctcatcgaactcaggcttttttattggcatttcatctccatctgcggcacacgcaattgccgaagcatatcgatacagcaccttaccctgcccctcctggcacaataacatcaaccagctactcttcaagctaacacccaaatgcatttctttatgaattaatccgtaacaaacacgcttcccatatagaaatatttgcaaaaatagtgcatgaaataagctttttctctaccaatccgggatataaatattcatcagcaccacaatattccacagcactaaatctctccccgccaccccgtacctctgataatggtctaaaatcattgaagccacttgcgacgacgttgctcaataaggaaaatttggcgtgaataatattcaacaccagtgcagcatcatcattacatacttacagccgccgactaccgctttcgatatattgactcaattttccagcctggttaaaaatagcgaccagctcagtcgcaaatatagtgactaccctaactaagcaacaataaggaatacactatgactgttcaaacaagtaaaaatccgcaggtcgatattgctgaagataatgcattcttccctagtgaatatagccttagccaatataccagtcctgtctctgatcttgatggcgtggactatccaaaaccttatcgcggtaaacataaaattctggtgatcgccgcggacgaacgttatttgccgaccgataacggaaaactgttcagcaccggtaaccatccgattgaaacgttgctgccgttgtatcatctccatgctgcaggtttcgaattcgaagtggcgaccatttccggtctgatgaccaagtttgaatactgggctatgccgcacaaagatgaaaaagtaatgccattctttgagcagcataaaagcttgttccgcaatccgaagaaactcgcggatgttgttgccagcctcaacgctgatagcgaatatgcagcaatctttgttcctggtggtcatggcgcacttattggtttacctgaaagccaggacgtggctgccgctttacagtgggcaatcaaaaatgaccgttttgttatctccctttgccacggcccggcggcttttctggcgcttcgccacggcgataacccactgaatggttattccatttgcgcattcccagacgccgcagacaaacaaacgccagagattggctatatgccgggtcatctcacctggtacttcggcgaagaactgaagaaaatgggcatgaatatcattaatgacgacatcaccgggcgagtacataaggaccgtaaacttctcaccggcgacagtccttttgcagcgaatgcgttgggtaaactggcggcgcaggaaatgctggcagcttacgcgggttaatccctgttacgtttgaatgtaagcgcataatcaatcgcggccgcgttagtactcacgacgtggctgcgttttttcacggttaatttatggcgtactgaagccctatgttaatttctttgcggtaacgtaatccggaacacattatgcttattgagatagtgatacgtagcacttcccccatgcaattcggcaatcgctttgactaaagaaaggcctagtccctgacctacggaatgacggctattatctccccgccaaaatctacggaagagtttttcaggctcattaattttcgttccagggctggcgatatcaatattaagatagctgttggtatcaagaaaactggttatatgaatacggcttttttctgggctatatctaatggcattaacaataagattgcttaacattcgttgtagtaaaattttatccgcaaagatttgctgattgcactcgaccttaaagcaaatctctttctcgtcactaaggtattcaagatagtccaacaaattttcgacttccttattgagagaaaggctgtccagtttcaccaaaacattgtttttatctgccctggcaagaaacagtatgttctctgttaaccggctaatattttccagctcttcaatgtttccggcaattgttttttgatattcagcgatacttctggtttgactgagcgtaacctgattctgacccagtaatgcattaattggcgttctaagttcatgagcgagatcgtcagcaaactgacttagacgctcaaaatctttgactaaagcatgatgcattttattcaacgcctgcccaagaggttttagttctctcggtaatgcgctaacctcaacaggctctcggctatcgttataattcagcgcttccgttacaccactcaactttttgatctctcgtaatcccgttctgattaacagcggacttaatacactgcaaagtacaatggcgacaatgcaaattataatgctattaattttatactgttcaagcatgttatgtctggcactagccaatttagccacagtaaccgttaaacttgggctaacttcatcaatattaattcgtaaagcatctatctctgtatcattaataatgcttctgtaaatgccagctgcgctgattgtctcactagcaggtatgttatttaacatgccatcactgacatttgtccggttaacaattttattgatgctatcaccatgaataatcaagatatcctgactaacatccatcatccggttaaagtacacaggtaacgtatctggatttaccccatcaattaacaactgcttgatctgcgctgtccggttaatgagtgttgtatcatcgcgccatttcaactcacttgccaggccattatagagagtccagacaattccggcgccagcaacagacagtagcaatataaaaagcaaggttaaacggacggttatagatagtcttttcattatttttttaccgctacgaaactatagcccatcccccggattgtggcaattagcttttcaggaaaaggatcatcaacttttgcgcggagcctgcgaatggcgacgtccaccgtattggtatcactatcaaagttgattccccaaatttcactcgcaataaccgttctgggtataatttcgccagctctggaggccagtagccaaagtaactgaaactccttgcgcgtcagtgtaatactgatattgtccctgctcacactatgactaacagagtccattcttaagccgctgatttctaatgtactattcaaagcgtgatgttgccttaattgtgcccgaacccttgccagcaactcagaaaaactaaaaggttttaccagataatcatttgccccactgtccagccctctgactctgtcatcgacagaatcccttgcagtaaggcaaataacaggggtttgctttgctgttcttaacgtttgtaagatctgccagccatccatacccggaagcataatatccagaatgatcaatgcataatcatccttcagcgcaagataaagcccatctctgccatcagaaacggcatcgatgacataacccgcttcggaaagcccctgcgttacccattcctgggtcctttgattatcttcaataagtagaatcttcatgaaaataatatgccataaatcatatgttatagaaacagcctggttcattacaaaattgtaatgctgctgtaaggttaccctggacgctttttcgctatcctcaaaactcattcacatgacaaggatataaacatgttaaagcgttatttagtactcagcgtagcaacggcagcatttagtttaccttctttggttaatgccgcacaacaaaacattcttagcgtgcacattttgaaccagcaaacaggaaaacccgctgctgacgtgacagtcactcttgaaaagaaggcggataacggctggttacaacttaataccgccaaaacagataaggatggacgaattaaggcactgtggcccgagcaaactgcaactacgggcgattaccgtgtcgtatttaaaaccggggactatttcaagaaacaaaatcttgaaagtttcttccctgagatccccgttgaatttcatattaataaagtgaacgagcattatcatgtgcctttattacttagccaatatgggtatagtacctatcgtggcagttaatgcataaatatgtaaaagcagatctctgctactgttagggaggacactccctgacagattaacagtaaacggctcttgctggctaacgacaaaaaagtgtgatggcttatgaaaaagaatcaatttttaaaagaaagtgatgttacggccgagagcgtattctttatgaagcgtcggcaggtgttaaaagcactgggcatcagtgcaactgcactttctttgcctcacgctgcgcatgccgatctgcttagctggtttaaagggaacgatcgcccgcccgcccccgccggaaaagcgctggagttcagcaagcctgccgcctggcaaaataacctgccactgacgccagcagataaagtttccggttataataacttctatgaattcgggctggataaagccgatcccgccgctaatgctggtagcctgaaaaccgatccatggacactgaaaatcagcggcgaagtggcaaaaccattgaccctcgatcatgatgacttaacccgtcgcttcccgctggaagagcgtatttatcgtatgcgctgcgtggaagcgtggagcatggtggtgccgtggattggttttccgctgcacaaattgctggcgcttgccgaacctaccagcaatgcgaagtatgtcgctttcgaaacaatttatgcaccggaacagatgccaggccagcaggaccgctttatcggcggtgggctgaaatatccttatgtcgaaggattgcgtctcgacgaagcaatgcatccgctcacactgatgaccgtaggtgtttatggcaaggcgttaccgccacaaaatggcgcgccggtgcgactgattgtgccgtggaaatatggctttaaagggattaaaagcatagtcagtattaagctgacccgcgagcgtccgccaaccacctggaatctggcagcgcctgacgaatacggtttttacgccaacgttaatccgtatgttgatcacccgcgctggagtcaggctaccgaacgatttattggtagtggcggcatcctcgatgtacagcgccagccaacgctactgtttaatggttacgccgcccaggtggcaagcctgtatcgtggcctggatttgcgggagaatttctaaatgcgtctgacagcaaaacaggtgacatggctgaaagtttgcctgcatcttgccggattgttgccgtttctctggctggtctgggcgatcaatcacggtggactgggtgccgatccggtgaaagatattcagcattttactggtcgcactgcactgaaatttttgctggcgaccttgttaatcacccctctggcacgctacgcaaaacagccgttattgatacgcactcgccgcctgttaggattatggtgctttgcctgggcgacactgcatttaacaagttacgcattgctggagctgggcgtgaataatctggcgttattaggtaaggagttaattacccggccttatttaacgttaggtattatcagctgggtaattttgcttgctttagcgttcactagtacccaggcgatgcagcgaaaactcggcaagcactggcaacagttgcataatttcgtctatcttgtcgcgattctggccccaatacattatctgtggtccgtgaagattattagtccgcagccgctcatctacgctgggctggctgtactgcttttagccttacggtataagaagttgcgttccctttttaaccggttacgcaagcaggttcacaacaaattatctgtataacttcatattgccgacaaagtacgcgttatccctgccggatgtggcgcgagcgccctatccggcatacacagatcgcatcaggttatgtttcgtttgtcatcaacctcaaatcaccaaaataatttattttatttcaataagatagataagtagaactgagaaagccatgctctcgtttcctaagagttgttgcattttgctatatgttacaatataacattacacatcatatacattaactctggaggaaactgttttggcgattcgtctttacaaactggctgttgctttaggtgtctttattgttagcgctcctgcctttagccatggtcatcacagtcacggcaaacccttaacagaggtcgaacaaaaagctgctaatggtgtttttgatgatgccaatgtacaaaaccgaacgctcagtgactgggatggagtctggcaatccgtttatcctttactgcaaagtggcaaacttgaccccgtctttcagaagaaagcggatgcagataaaactaaaacatttgctgaaattaaagattattatcacaaaggttatgcaacagatatcgagatgattggcattgaggacggcattgttgaattccatagaaataatgaaacaacaagctgtaaatatgattacgatggatacaaaatactcacctataaaagtggcaagaaaggcgttcgttacttattcgaatgtaaagatcctgaaagcaaagcccctaaatatatacaatttagcgatcatataattgcaccacgaaaaagttctcattttcacatttttatgggtaatgatagtcagcaatctttattaaatgaaatggaaaactggccaacgtattatccatatcagttgagtagcgaagaagtggtcgaggaaatgatgtctcattgagtattctcatgataacgcctcgatgccgctttagtaagttatcataactgccactggtccatccacaaacgccactgaacgcaagctagctacagacacgctcatcactatgacgtgtctgtatattaataagctaacccgcattgagttaaccaataacggattccatacacaatacggccaacagagaaagatacctgtgctcacgccattgcttatattggctggttacaatatgcactatcaattttttaaataacaaattattaaaaccacatctgtataaggaatttttaaggttcgtgggatagcttgactgtgaaaatcacaggagctacaaaaatgaaccgattcagtaaaactcaaatttatttacattggataacgctgcttttcgttgcaataacctatgccgcgatggaactccgtggctggtttcctaaaggtagtagtacttatctgctgatgcgagaaacacattacaatgcgggtatattcgtttgggtgttaatgtttagtcgcctgattataaaacaccgttatagtgatccttctattgtgccaccgccacctgcctggcaaatgaaagcggctagcctaatgcacatcatgctttatataaccttccttgcacttcctctgctggggattgctttgatggcttacagtggaaaaagctggagtttccttggtttcaatgtgtctccctttgttaccccaaacagcgaaattaaagcactgataaaaaatattcacgaaacctgggcaaatataggctactttttaatcgcagctcacgctggcgcagcactctttcatcactacattcagaaagataatactctgttacgaatgatgcctcgccgcaaataagtcgatccccttacaaggaaatgtgaaccatggacatcaacgcgtcataaatgtttacgcaagtgcacaatgcaccctttccactatcaacaaggaggagcagaaactgtgtaaatcgtacaatggtaagacttatcaaaaatacaggttaattttggtatttaaaccttttttacttgttagtatgatacaaaggctttcaaaaaagctgcgaaattcaacaactcttggaaattatggactttgtcccgcggctttaatctgacggccgcgttccttttttgactcaattattgaacccttctctacgcaacttcagttcccaccaccaactttgcggcagtttcataggatgaatgtctaaaagaataatggtgagcgataagaaaacgactgaataactgcacattttcgctcgaaagcttcctgtcagatccatagcgaatcaagtgctgaatgtcacagtatcgaacagaaaacagtgacgatctaacccttcaagaatattctacgattgttctgtttaggaaaagcaaggcgggaagtcgggagataagtcattgataaagtggcggagagagggggatttgaacccccggtagagttgcccctactccggttttcgagaccggtccgttcagccgctccggcatctctccgttcagatggttgccatgatgccaggaaatttggcattttaacagtccctgtccgtgcaattttgttcaagtgacgagtttgcgagcaaaacgatgattaagtggccctggaaagtacaagaaagtgcacatcaaactgcccttccctggcaggaagcactaagcatcccccttttaacgtgtctgacggaacaggaacaaagcaaattagtcactcttgccgaacgttttttacagcaaaagcggcttgttcctttacagggctttgaactggatagtttaagaagctgccggatagcacttctattttgcctacccgttctggagttaggactggaatggctggatggttttcatgaagtcttaatttatcctgcgccatttgtggtcgatgatgaatgggaagacgatatcggtctggtgcataaccaacgtattgttcagagtggtcagagctggcagcaagggcctatcgttttgaactggttggatatacaagattcttttgatgcttctggttttaacctgattattcatgaagtcgctcataagctggacacccgtaacggcgatcgcgccagcggagttccctttattccgttgcgtgaggttgctggctgggaacacgatcttcatgctgcaatgaacaacattcaggaagaaatcgaattggttggcgagaatgcggcgagcattgatgcttatgcagccagcgatcctgctgaatgttttgccgtactttctgaatatttctttagcgccccagaactttttgctcctcgtttccctagtttgtggcaacgtttctgccaattttatcaacaagatcctttgcagagactgcatcacgctaatgatacagacagctttagcgcgacgaatgttcattaattaacaactttgcagattaattaaccaattgaaatgacttatgaaatttagtgttgacagacaaggtaccgctaagtaatattcgccccgttcacacgattcctctgtagttcagtcggtagaacggcggactgttaatccgtatgtcactggttcgagtccagtcagaggagccaaattctaaaaattcgcttttttagcgcaatgtcactgaccttagttgaacattgttttttaacggatagcgggtttttaacatcttaagcgccctcgacctttatggttgagggcgttttgctatgaacgccatcaccattttcccctcgattataaaacttgagttattcagtagtctcccctcttgcaactcacacccaaaactgcctaacgaaaagttattaattttcaatcatattgctatcagtatttacattttttcgctgtgctagaaagggcgcatttatgttagctcgtagtgggaaggtaagcatggctacgaagaagagaagtggagaagaaataaatgaccgacaaatattatgcgggatgggaattaaactacgccgcttaactgcgggtatctgtctgataactcaacttgcgttccctatggctgcggcagcacaaggtgtggtaaacgccgcaacccaacaaccagttcctgcacaaattgccattgcaaatgccaatacggtgccctacacccttggagcgttggaaagcgcccaaagcgttgccgaacgtttcggtattagcgtggctgagttacgcaaactcaaccagtttcgtacgtttgctcgaggttttgataatgtccgccagggtgatgaactggatgtcccggcacaagttagtgaaaaaaaattaaccccgccgccgggtaatagcagtgacaacctcgagcaacagatagccagtactagtcagcaaatcgggtctctgctcgccgaagatatgaacagcgagcaagcggcaaatatggcgcgtggatgggcctcttctcaggctagtggcgcaatgacagactggttaagccgcttcggtaccgcaagaatcacgctgggcgtggatgaagattttagcctgaagaactcccagttcgattttctccatccgtggtatgaaacgcctgataatctctttttcagtcagcatactctccatcgtactgacgagcgtacgcagattaacaacggcttaggttggcgtcatttcactcccacatggatgagcggcatcaacttctttttcgaccacgatcttagccgttaccactcccgcgccggcattggcgcggagtactggcgcgactatctaaaattaagcagtaacggctatttgcgactgaccaactggcgcagcgcacctgaactggacaacgattatgaagcacgcccggccaatggctgggatgtacgcgcagaaagctggctacccgcctggccgcaccttggcggtaaactggtctatgaacagtattatggcgatgaagtggccctgttcgataaagacgatcggcaaagtaatcctcatgccataaccgctggacttaactatacccccttcccgctgatgaccttcagcgcggagcaacgccagggtaaacagggcgaaaatgacacccgttttgccgtcgattttacctggcaacctggcagcgcaatgcagaaacagcttgacccgaatgaagtcgctgcacggcgtagccttgcaggcagccgttatgatctggtggatcgcaacaacaatatcgttctggaatatcgcaaaaaagaactggttcgcctgaccctgacagaccccgtgacagggaagagtggagaagtgaaaagtctggttagcagcctacaaaccaaatatgccctgaaaggctataacgtcgaagccaccgcactggaagctgccggtggcaaagtggtcacaacgggtaaagatattctggttaccctgccggcttaccggttcaccagtacgccagaaaccgataacacctggccgattgaagtcaccgccgaagatgtcaaaggcaatttgagcaatcgtgaacagagcatggtggtcgttcaggcacctacgctaagccagaaagattccagcgtaagcttaagtacccaaacattgaacgcggattcccatagtaccgccacactgacttttattgcgcatgatgcagcaggtaatcctgttgtcgggctggtgctcagcacgcgtcacgaaggtgttcaggacatcaccctttctgactggaaagataatggtgacggaagctatacccagatcctgaccacaggagcgatgtctggcacgctgacgctgatgccacagctgaatggtgtggatgcggctaaagcccccgccgtggtgaatatcatttctgttagcagttcccgaactcacagcagtattaagattgataaggaccgttatctctccggcaatcctatcgaggtgacggtagaactgagagatgaaaatgacaaacctgttaaggaacaaaaacagcaactgaataacgcagtcagcatcgacaacgtgaaaccaggagtcactacagactggaaagaaaccgcagatggcgtctataaggcgacctataccgcctataccaaaggcagtggacttactgcgaagctattaatgcaaaactggaatgaagatttgcataccgctggatttatcatcgacgccaacccgcagagtgcgaaaattgcgacattatctgccagcaataatggtgtgctcgccaatgagaatgcagcaaacaccgtcagcgtcaatgtcgctgatgaaggaagcaacccaatcaatgatcataccgtcacgtttgcggtattaagcggaagcgcaacttccttcaacaatcaaaacaccgcaaaaacggatgttaatggtctggcgacttttgatctgaaaagtagtaagcaggaagacaacacggttgaagtcacccttgaaaatggcgtgaaacaaacgttaatcgtcagttttgtcggcgacagcagtactgcgcaggttgatctgcagaagagcaaaaatgaagtggttgctgacggcaatgacagcgtcacaatgaccgcgaccgtccgggatgcaaaaggcaacctgctcaatgacgtcatggtcactttcaatgttaatagtgcagaggcgaaactgagccaaaccgaagtgaatagccacgacgggatcgccacagctacgctgaccagtttgaaaaatggtgattatagggttacggcctctgtgagctctggttcccaggctaatcaacaggtgaattttatcggtgatcaaagtactgctgccctgaccctcagtgtgcctagtggtgatatcaccgtcaccaacacagctccgcaatatatgactgcaaccttgcaggataaaaatggcaacccactaaaagataaagaaatcaccttctctgtgccaaacgacgtcgcaagtaagttcagcattagcaacggaggaaaaggcatgacggatagtaacggggttgcaatcgcctccctgaccggcacgttagcgggcacgcatatgatcatggctcgtctggctaacagcaatgtcagcgatgcacagccaatgacgtttgtggcggataaagacagagcggttgtcgttttgcaaacaagcaaagcggaaatcattgggaatggcgtggatgagacaactctgacagcaacagtgaaagatccgagcaatcatccggtggcggggataacggtaaacttcaccatgccacaggacgttgcggcaaactttacccttgaaaataacggtattgccatcactcaggccaatggggaagcgcatgtcacgctgaaaggtaaaaaagcgggcacgcatacggttaccgcaacgctgggtaataacaataccagtgatagccagccggtaacatttgtggcggacaaagccagcgctcaggttgtcctgcagataagtaaagatgagatcacaggtaatggcgtcgatagcgcaacgctaactgcaacggttaaagatcagttcgacaatgaggtgaataatcttccggtaacattcagcagtgcctctagtggactcaccctgaccccgggagtaagtaataccaacgagtctggcatcgcgcaggccactctcgcaggcgttgcctttggtgagaagacggttactgcaagtctggctaataatggtgccagcgacaacaaaactgtgcattttattggcgacacagcggcggcaaaaattatcgagttggcgcctgtcccagacagcataatcgccggtaccccgcagaacagctccggcagcgtcatcaccgccacagtcgttgataataatggctttccggtgaaaggtgtgactgtgaacttcaccagcaacgcagcgacagccgaaatgacgaacggcggtcaagccgtgacgaacgaacagggtaaggctaccgtcacttataccaatacccgctccagcatagaaagtggagcgagaccggataccgttgaggccagtctggaaaatggtagctccacgcttagcacaagtattaatgtcaacgctgatgcgtctacggcacatctcaccttgctacaggcactttttgatacagtctccgcaggcgagacaaccagtctgtatattgaggtgaaggataattacggcaacggtgtcccccagcaggaggtaaccctcagcgttagtccaagtgaaggcgtgacccccagtaataacgctatatatactaccaaccacgacggcaatttttacgcaagctttaccgctacaaaagccggggtttatcaattgacggcaaccctcgaaaatggcgatagcatgcaacaaacagtgacctatgtgccgaacgtcgcgaatgctgaaatcacgctggcagccagcaaggatccggtgattgccgacaataacgatctcacgacactaacagcaacagtcgctgatacagagggcaatgcgatagccaacactgaggtaacatttactctgccggaagatgtgaaggcgaacttcacgctgagcgatggcggtaaagtgattactgatgctgaaggcaaagcgaaagtcacgctgaaaggtacaaaagcaggcgctcatactgttacagcaagcatgactggcggtaagagtgagcagttggtggtgaactttattgcggatacgctcactgcgcaggttaatcttaacgttaccgaggacaattttatcgctaataacgtcgggatgaccaggctgcaggcaacagtgactgatggaaacggcaacccgttagccaatgaggcggtgacattcacgctaccggcagatgtgagcgcaagctttactctcggacaaggcggttccgccattactgatatcaacggcaaggctgaagttacactgagcggtacaaaatccggcacctaccccgtgacagttagcgtgaacaattatggtgtcagtgatacgaaacaggtgactttgattgccgatgctggtaccgcaaaactagcctccttaacctctgtatacagtttcgtcgtcagcacgaccgagggcgcaaccatgacggcaagcgtcactgacgctaacggcaacccggtagaaggcataaaagttaatttccgcggaacctccgtcacgctaagcagcaccagcgttgaaacggatgatcggggtttcgctgaaattcttgtgacaagcaccgaggtcggactgaaaacagttagtgcctctctggcagataaacctactgaagtcatcagccgattactgaatgccagtgcagatgttaattctgcgacgattaccagtctggagataccggaaggtcaggtaatggtcgcacaagacgtagcagttaaagctcacgttaacgaccagtttggcaacccggttgcgcatcaacccgtgacattcagtgcagagccatccagccaaatgatcatcagccagaatacggtctctactaatacgcagggtgtagccgaggtcaccatgacgcccgaaagaaacggtagctatatggtgaaagcatccctgccgaatggagccagtcttgagaaacaactggaggctattgatgaaaaactgacactcacggcgtccagtccgcttatcggtgtctatgcccctacaggcgctactctgacggcaacgctaacctctgcaaatggcactccagtggagggtcaggtcatcaactttagcgtaacgccagaaggggcgacgttaagtggcggaaaagtgagaactaactctagtggtcaggctccagtcgttttgaccagcaataaagtcggtacatatacggtgactgcatctttccataacggcgtaacaatacagacacagacaaccgtgaaagtcactggcaacagtagcaccgcccatgttgctagctttatcgctgatccaagcactatcgccgccaccaacactgatttaagtaccttaaaggcaacggttgaggatggcagtggtaacctgatcgaaggtctcactgtgtacttcgccttaaaaagcggctctgccacattaacgagtttaacagcggtgaccgatcaaaacggaatcgcgacaacaagcgtgaaaggagcgatgacaggtagcgtcacggtaagcgcagtcacgaccgctggtggaatgcaaacagtagatataacgctggtggctggcccggcagacaccagccagtccgtccttaagagcaatcggagtagtctgaaaggggactataccgatagtgctgaattacgtcttgttctgcacgatataagtggcaatccgatcaaagtttctgaagggatggaatttgtgcaaagtggtactaacgtgccctatataaaaattagcgcaattgattacagtctaaatatcaacggtgattacaaagccactgttacaggaggcggagagggtatcgcaacgctgatccctgtattgaatggtgttcatcaagctggtctgagtaccacaatacaattcactcgcgcagaagacaaaataatgagcggtacagtaagtgtcaatggtactgacctaccgacaactacattccctagccaggggttcaccggggcgtattatcagttgaataatgacaactttgccccaggaaaaacggcggctgattatgagtttagtagctctgcctcctgggtcgatgttgatgctaccggtaaagtgacatttaaaaatgtcggcagcaatagcgaaaggattacggcgacgccaaaaagtggaggccctagctatgtatacgaaatccgtgtgaagagttggtgggtgaacgccggcgaggctttcatgatatacagccttgctgaaaatttttgcagcagcaatggctacacgctccccagagcaaactatttaaaccactgtagttcccgaggcatcgggagtctgtacagtgaatggggagatatggggcattacacgactgacgctggttttcaaagtaatatgtattggagttctagtcccgcaaacagtagcgaacaatacgtagtttccctggcaacaggtgatcaaagcgtatttgaaaagcttgggtttgcttatgcgacatgttataaaaacctgtgattttccgttataatttcttaaagagtgttccattcggggcactcttttttacattccctctacagaactagcccttctctcacagaaaatgaataaataaaaatgcggcaccgccagaatcgcgttcgatgtgactatgatcattttcggtgagtactgctttgatctaaaggctggttttctgtgatgattgaccagcctcagagtattgatgacaccaccgttcataacagatcggcattactatgcataagtactgtctcatattctcgccaaaacactttttaatgcctttgcgaattcatccagacttatattgtcaattttttgcccaacgacgactgactccgagacatcggccattgcgggccatcgcgttttgtaatcagcataaattgcaacaacaggggtattataggcacttgccatatgtaatattgaggtgtcaggagttattgcgatataagcatcttttatgattgctgctgaacgtttaatcgagggtggtaaggataaacggtagacattattataacaatccactaatgccctggctttatcttcacctttgggtccatgaacgatcactattggtatatctgtttcactttaaatttttgctattagattttctgcaatcgataatgaaaatgtacgttcctgcgagctaccttctaaattgaacgcaatgtaagatcctaacgatcgcatttcctcgcgcacctcatcgagtacatcctcacttagtggcaattcatatattggcctgactgctggaaaacccgcctcacgcatcataaatgcccatgtcataggtacgggagcccggagtttctgatccatactggacgcgttcttgcacaaaggggagaagcaattcatggttataccaacaacctgaaaattcgtttttgctttcaactgactgataaataacatcgttttcaggttctttttacgcatcccctcaatgcaaagatccggcgtaccgtattgctgtgttatgttctttgctaaatcttttatttcttttaatgttgcgtgatcctgcatagtcattgtgactaatgttaatttagtctgttcaagtttaagcgcattaaagacttctaaattaattgtcgacgttacaattaaaagatgcttaattttatgcaattcaagcgcccgaataacaggaaagatggccatagcatcgccaatctgatcgggaatatggatgacaacaaagtctgttttttcaatattgaaattataagctttataatcgtagtaactaaatgcaatacgtctcaacaatgatgctaaaaacatacctaacctcgcctccctactggttataatgcaatgcagtctatcagactcatcagggtgccattttgtgcatatgcggacttttatgtttcatatctctaacctgtgggtcctctgcttaatccttaaacaacaccagcaactcctgcgctttcatcttccatcgaatttttcatgttgccgctaatcagccataaaatcatttgcagatgcgctctgtcgaggtagtctcataaggttcgtttatagatcgacggcaatgtgagttaccttttccatactaattataaaaagacagtacaaacaggatcattatggactccacgctcatctccactcgtcccgatgaagggacgcttagcttaagtcgcgcccgacgagctgcgttaggcagcttcgctggtgccgtcgtcgactggtatgattttttactctatggcatcaccgccgcactggtgtttaatcgcgagtttttcccgcaagtaagcccggcgatgggaacgctcgccgcatttgctacctttggcgtcggatttcttttccgtccgctcggcggtgtcattttcggtcactttggcgaccgactgggacgtaagcgcatgttaatgctgaccgtctggatgatgggcatcgcgacagccttgattggtattcttcctagtttcagcaccattgggtggtgggcacctattttgctggtgacactgcgtgccattcagggatttgcagtcggcggcgaatggggaggcgcggcgttgctttccgttgaaagtgcaccgaaaaataaaaaagccttttacagtagcggtgtacaagttggctacggtgtaggtttactgcttagtaccggactggttagtttgatcagtatgatgacgactgacgaacagtttttaagctggggctggcgcattcctttcctgtttagcatcgtactggtactgggagcattgtgggtgcgcaatggcatggaggagtccgcggaatttgaacaacagcaacattatcaagctgccgcgaaaaaacgcatcccggttatcgaagcgctgttacgacatcccggtgctttcctgaagattattgcgctacgactgtgcgaattgctgacgatgtacatcgttactgcctttgcacttaattatagtacccagaatatggggctaccgcgcgaacttttccttaatattggtttgctggtaggtggattaagctgcctgacaattccctgttttgcctggcttgccgatcgttttggtcgccgtagggtttatatcacaggtacgttaatcggaacgttgagcgcatttcctttctttatggcgcttgaagcacaatctattttctggatagttttcttctccataatgctggcaaacattgcgcatgacatggtggtgtgtgtgcaacaaccgatgtttaccgaaatgtttggtgccagttatcgctatagtggcgctggagtcggttatcaggttgccagtgtggttggcggtggatttacaccttttattgccgctgcactcatcacttactttgccgggaactggcatagcgtcgccatttatttgctggctggatgcctgatttccgcaatgaccgctttgttgatgaaagacagtcaacgcgcttgatagcctggcgaagatcatccgatcttcgccttacacttttgtttcacatttctgtgacatactatcggatgtgcggtaattgtatggaacaggagacacacatgaataataagggctccggtctgaccccagctcaggcactggataaactcgacgcgctgtatgagcaatctgtagtcgcattacgcaacgccattggcaactatattacaagtggcgaattacctgatgaaaacgcccgcaaacaaggtctttttgtctatccaagtctgaccgtaacctgggacggtagcacaaccaatccccccaaaacgcgcgcatttggtcgctttacccacgcaggcagctacaccaccacgattactcgccctactctctttcgtagctatcttaatgaacaacttacgttgctgtatcaggattatggtgcgcatatcagtgtgcaacccagccagcatgaaatcccttatccttatgtcatcgatggctctgaattgacacttgatcgcagtatgagcgctgggttaactcgctacttcccgacaacagaactggcgcaaattggcgatgaaactgcagacggcatttatcatccaactgaattctccccgctaagccattttgatgcgcgccgcgtcgatttttccctcgcacggttgcgccattataccggtacgccagttgaacattttcagccgttcgtcttgtttaccaactacacacgttatgtggatgaattcgttcgttggggatgcagccagatcctcgatcctgatagtccctacattgccctttcttgtgctggcgggaactggatcaccgccgaaaccgaagcgccagaagaagccatttccgaccttgcatggaaaaaacatcagatgccagcatggcatttaattaccgccgatggtcagggtattactctggtgaatattggcgtgggaccgagtaatgctaaaaccatctgcgatcatctggcagtgctacgcccggatgtctggttgatgattggtcactgtggcggattacgtgaaagtcaggccattggcgattatgtacttgcacacgcttatttacgcgatgaccacgttcttgatgcggttctgccgcccgatattcctattccgagcattgctgaagtgcaacgtgcgctttatgacgccaccaagctggtgagcggcaggcccggtgaggaagtcaaacagcggctacgtactggtactgtggtaaccacagatgacaggaactgggaattacgttacagtgcttctgcacttcgttttaacttaagccgggccgtagcaattgatatggaaagtgcaaccattgccgcgcaaggatatcgtttccgcgtgccatacgggacactactgtgtgttagtgataaaccgttgcatggcgagattaaacttcccggccaggctaaccgtttttatgaaggcgctatttccgaacatctgcaaattggcattcgggcgatcgatttgctgcgcgcagaaggcgaccgactgcatagccgtaaattacgaacctttaatgagccgccgttccgataataagttctgaaccttcttatcagaaatagatgtgaaggagtaagtaagacacctggcaaatagcctgcaataatcgtgggctgtttgcttccttgggcggatacgagttttattatcgtcttaatgatttccacatattaaaagcaagtatgctttcaaaacacaattataaaaaatcccgccaacaatataagtttttataaaattaaatataagattatggctttagaatatttttatttctaatagacgagatttttcctgttatgatataatatgctgaattaacacatgttaacgatttaccagtaatgtaaataaattttcgaggagatcattccagtgggacgtaaatgggccaatattgttgctaaaaaaacggctaaagacggtgcaacgtctaaaatttatgcaaaattcggtgtagaaatctatgctgctgctaaacaaggtgaacccgatccagaattaaacacatctttaaaattcgttattgaacgtgcaaagcaggcacaagttccaaagcacgttattgataaagcaattgataaagccaaaggcggcggagatgaaacgttcgtgcagggacgttatgaaggctttggtcctaatggcagtatgattatcgccgagacattgactagtaatgttaaccgtacgattgctaacgttcgcacaattttcaataaaaaaggcggcaatatcggagcggcaggttctgtcagctatatgtttgacaatacgggtgtgattgtatttaaagggacagaccctgaccatatttttgaaattttacttgaagctgaagttgatgttcgtgatgtgactgaagaagaaggtaacattgttatttatactgaacctactgaccttcataaaggaatcgcggctctaaaagcagctggaatcactgagttcagtacaacagaattagaaatgattgctcaatctgaagttgagctttccccagaagatttagaaatctttgaagggcttgttgatgcccttgaagatgacgacgatgtacaaaaagtttatcataacgtcgcaaatctctaattatcttttaaagaaatctgtctttacggcagatttctttaatctcatataattcttataaaaaatataatattcaactcgtcatattgattatacccccccgttcccagagaaataatatttattaaaattccagttcttctttttctgattacagaaggcaaagtggcaattacgcatagtttcccgataaagacgcgatagcgacatcccgcataaggcatttttctctttatctttgtacggtacttcatggaacagagtttttgaccttgcgaatcgtgatgtctgttggggagggacaatttgctcactgaagcgtgagactcgattaagcgcacgaaacacagaaatcaaaaaacccggtcacttttttacaaggtaaccgggtaaaaataatttttattttttaactgttttgagactcatagagatgtctcaaaactaaaatttggctcctctgactggactcgaaccagtgacatacggattaacagtccgccgttctaccgactgaactacagaggaatcgtgagaacgaggcgaatattagcgatgcccacccacaatgtcaaagcctgttttttaaatttgaaatcgtttgctgaaataatctgcattttgtcgtttattcgctcacaactggctttttttcacacttttgcggctcgggtcgagggtatttccatagccaacgtccagtaaccattcgccagtaaaacagcacggcccgcacagcccagtcggcaaacattcccatccagacaccaaccacaccccagccaagcatgattcccagcacataaccgactacaacccgacaaccccacatgctcaacatgctaacccacatggcgtaacgggcatcacgagcacctttaaatccagcgggtagcacccaactggcggaccaaataggcataaataaagcatttagccaaatcagaatcacaacgacatgtttaacctgtggatcctgggtgtaaaagcttgccataaccccggcaaagggagccgttagccaggcgatggccgttaatccaagagtggaaagccagaacacatgccgcaactgaatctctgcttgcgctatctgccctacccccaaccttcggcctgtaatgatcgtagaagcagagccgagcgcacttccgggtaagttgataagagccgcaatactaaacgcgataaaatttccggcaataacactggtccccatcccggcaacgaacatttgggttaataaccgaccactggtaaataacacactttcgacactcgcgggaataccaatccccatgacttcccagataatgctaaaattcagcggtttaaaatagctctttaagctaatccttagcgcaggattaaaaccaatcgccagcacccacaaaattgcaactgcgccaatataacgagaaatggttaaacccagccctgccccgacaaatcccagtcccggccaggagaaaaggccgtaaatcaatatgccgctaataataatattaagaatattcaggctaccgttaatcaatagcggtattttcgtattccctgcaccacgaagtgccccgctaccaataagagtgatggcagctgctggataactgagtaccgtcagctccagataagtcaacgccagtgctttaacttctgtcgtggcatcacccgcgacgaaatcaataatttgttcgccaaaatgatgaataagcgttgccaacagtacggcaaacaacgtcatgatcaccaaactctgccgcgtcgccaccctcgctcgtcgtcgatcccgcttaccgagactaaatgccacaacgacagtagtaccaagatcgatagcagcaaaaaaagccataatgaccatattgaagctgtccgccaatcccacgccggccatcgcatcttttcccagccagctgaccagaaaagtgctcagaacccccatcaacaggacacaggcattctccatgaagataggaacagcaagcggggttatctcgcgccagaacaacactttgtagctcttgcgtttagcgtgccagcgagtgccgtgaacaacctggcgtaaagcagaggagatattcaaagcgctccttaattgcagaaagtgaaaccacatttcaaataaactgggagaatcagcaaagctgcaaagattttcgccaacaaattgtctgcaaatgcaacaaactgtacttagaaacggcaaacagttggggaatttaaaaatcgggttactcaaaagatttttcgccgttaagatgtgcctcaacaacgattcctctgtagttcagtcggtagaacggcggactgttaatccgtatgtcactggttcgagtccagtcagaggagccaaattcctgaaaagcccgcttttatagcgggatttttgttatatctgataatcaatttcctcttcactgctttccatcacctgccgcttgatatcctcaacactcagtcctgcattacaaagttccagaaagcgccagacatagttacgctgaagttgtcctcgcttcagtcccaaccagacagtattagcatcaaaaagatgccgcgtatccaggcggattaaattctcttcctcttgttcgccactggattgctcggcaactaatccgatcccaagcccaagagcaacataggttttaatgacatcagaatcctgcgcacttaatacaatatctgccagcaaacctttgcgggcaaatgcgtcatcaatacgactgcgccccgtaatcccctgtcggtaagtgattaacggccacttcgctatactttccagcgtcaatggactaatttgcgtcaagggatgatcgtgtggaacaagcaaactatggtgccaacgaaaccacgggaaggcgacgagctgcgggtcattactcaaacgctcgctggcgataccaatatcagcttcgccattttgcaacaatgtcgcaatttcctgtggcgtcccctggattagctcgagccgaacctccgggaaaagttcgcgaaaagctttaatgacctctggcaagctataacgtgcctgagtatgcgtcgttgcaatagtgagaacgccagacgtatcgttggtaaacaggtctgcaagccgacgaacattactggcttcattcagaatacgttctgcaatgaccagtaatgctttgcccggttcagtcatgcccagcagtcgcttacctcgtcgaacaaatatttcgatgccaagttcatcctccagttcccgaatatgacggctgacgccactctgactggtaaaaagcatattcgcaacctctgtcaggttgtaatcctgacgtgcagcctcgcggattatctttagttgttggaaattcacggtaaactccgggcagttcagatttcccgttattgttaaagtctaatgcccggcataacaaataataaaaacccgcatcttattccatcccgatataacacttagctcaccaattgccactgccttttttccatcactggagaactaatcacactcattaacaactctttcactgcctgtgcctgtgggcttaagttcgctctggcgggtaaatttaaactcaaagagagactcatggaaggagtggtaatgcgactcatccacccatttactgcgccacataagctacgcgcggcgctttcgggtaatactgcaacgcccatgccgctggcaatcgctgcggtaagcgtggcaatagactcaatttcaccaataacttttgccgtgagtcgccgtagggaaaaagcctcatcaacacgaagtctaatagcactgtaatcactggggagaaagaggttcatttgcgcaatagcattcacatcaacgctttgccccgggcaatcttgagttcctaccagaaaaagatcttctttcagcaaagcctgactggatacaccagccacaggggaatgctcataaatcaccgccatatcgagttggtgatttatcaatttttcgttaagcactgcaccactattttcatgaagatagataacgatctccggaaattcagcgcgaaccgcctgtaataagggcatggtgatggaactcgcagcggttcctggtgcaaagccaatgctgacttgcccgcttaatgcctgaccaacgttatgcaccgccagttgggcctgttcacactgacgtaaaatggcccgcgcatgggtatagagaatttttccggcgtctgttggtgtaacgccccgctttgtacggatcaaaagttgttgatttaactcaccttccagtgtggcaacctgctggctgagcgctggttgtgcgatatgcaatacttcagcagcctgggtcaggctaccaatatctacaatttttacgaagtatttcaggcgtctgaagttcatgttgcctccggtttttaagaatcggcccaagtgccgccattacttacaaccagattgcaagatgcttgccagttttattttggtgttgatgtacaagctaaccaactgtcaaataagagattatgatagattcgtcatttgctcctttaatcagctgtcgcgttcccctgccctataaaaggagggtatgcaccacgatggttcattacccaataagattgaaagctcaccactttgttgaaattgacagcaaacaaacaaaaaaatgcatttcaccctttgacatcaccatgcactgccattaatatgcgccccgttcacacgattcctctgtagttcagtcggtagaacggcggactgttaatccgtatgtcactggttcgagtccagtcagaggagccaaattcaaaaaagcctgctttctagcaggctttttgctttctaattaccaacgctcttaaaacatctgtctactaccagaactaatttgcacaggcattccgcttcgacgttgcaacgcagcatttgcgcgatttacatcaacttcttgcccgttgataaacgcccgcaaagatggggttaccggcaatggcacttttcggtcagactcatattctgcacgattgcggctcaatggctcatgaacttccagccagttgctgccatctggttcagtggtgtattttactggctggtcgataatttgcacacgcgtcccaacaggaacattatcaaacagatatttgatatcgtcattgcgcagacgaatacagccctgacttacccggagcccaataccaaaattggcattggtaccatggatggcatacaacctgccaatataaatcgcgtacagccccatgggattatcggggcccgcaggaacaaatgcgggcaaactctcccctcgtttcgcatattcgcgccgagtgttcggcgttggcgtccaggttggagcttcttgtttacgttcaacggtagtcacccagttacgcggggtttctcgcccagcctggccgataccaataggaaagacttccacagtattactgtctggtgggtagtaataaagacgcatctcagcgacgttaacaacaatccctttacgaacagtgtcgggcaaaatcagttgctgcggaatggtgagttggctgccagacttcggcaaaaaaacatcagcgcccgggttcgcttccagcatgttacttaacccttgcccgtattgtgcggcaaaagtctccagcggctgggtattgtgatcaggaacagttacagtaaagctctgccccactaaacggctaccctctggaggtaatggataagttaccgccaggctagtatggctggcaaaaagcagagcaaaactgcaaagaatatttacacgacgcatcatgtccctttcctatgtcgcgaaagctatccgttaagtatagcttttatcagacttttcgtttttaactgttcaaatcagaagtcgtattccccggtagaacaatattactggcagcaagttcgcccatgttgttgtatatcgcacaggcagcttcgatgatgggcatcgccagagctgcgccactcccctcacctaaacgcatctccatattgagataaggctccagccccaaatggctgagcgctatacgcgcgcctttttctgcgctcaggtgagaaggaatgagatacggtttgatcgcaggagacatctggcaggctgcgagcgcagcagcataagaaagaaatccatccagcaacacgggtaaaccgcaggaagcagcacctaacatcactccagctattccgaccaaatcaaatccacccacttttgccaggacatcaacaccatcctgaggatttggttgattcaacgtaatcgcccgacgcacaacatcaattttattagccagtttatctgtcggcaggtttgcgccaatcccaaccacttcttcaggatcccggccagtgattgtgctgactattgctgctgccggtgtcgtgtttgccatccccagttcacctacaccaaacagcgtgacaccgttttttgccagctcctgcgtataacatatgacgtccaaaagcaacttttcagcctgacggcgactcattgccggagcactagcaatattgccgctacctcgtgcgacacgcatgttgataagcccggggataggctcagcagtatcaataccaacatcaattacgtggacgttagcgcccgcttgttctgccagcacacacacgccggttgttccacgggtcatattttcagcctgtatggctgtcacttcttttggagaaatagcgaccccttcctcccagacgccgtgatcggcacacataaccagtaccgcttttttgcccacatgcggtatgccattcaaccccggcattcctgccagttgtatggcaagcacctccagctttcccaggctaccaacaggtttgagtaacccgtcaatatgccgttgtgcacggctcatagcggtagaatcgatggctgggatcgtattcagtaaatcggcaagtatttgcatctcacgtctctttatagcagtgccagcaggaagaccagttcaccaagctctatggctgctcccagcgtatcgcccgtttgcccgcccagcgtacgtttgagaagctgaccgaggatgaaaatcgccaccatcgtcaccaccatagcagccacaccatgcatacccggcaataatacggcagcaaaaatagcggctaagccgagtgtgacgcaggtttgtcgcccatcaattttgccaatgaacacattgccaagcccttcttcccgcgcataacgatgacgatacatcaataatgcggcagtcccgcggctgaccgcacatgctgccgccaggcttgcaaggatgctttcgccacgcagagccaactcgcttaacaccagaatctttgccagtaccacaaaaatcaatgccagaccgccgtgggtgcctaaacggctatcacgcatgatttccaacatgcgatcgcggctacgtgcagaaaatacgccatcacaggtatcagcgaggccgtccagatggaatcccccggtcatcagcaccagcacaagtacgctaaacagtgccgccagtggtgcgccacaccatgcctgcagcaccatgaagaccagcccgctaatcgcgccaagcaataatccaatcaaaggaaaagtaataataccgcgagaataatgctcgaaatccagtccctgggaccagcgacgcggtacaggcagacgcgtaataaaactgagcatcgcccaaaataatttactcatttgatttttactccaataccgctaaccaccagccatacttcatttgccgcagcggccaactgctgatttacccgcccggcaatatcacgaaaatgtcgtgccagacgactctccggcacaatccccattcccacttcgttagtcactaatacaacctttgcggggcaacgttggcaggcagcaatcaagctctgaatctcagcattaatcgcctgttccatcgcctgataatcccattcatcagggtctttatcgccgccataatcaaacaacagattagtcaccattgtggtaacgcattcaagcaacacaacctcattcgggttaatgtctgcatgaattaattcatcaagatgttgccagcgctccactgtgcgccagtgctccgggcggccttgccgatgatgttctatccgtgcagccatctcatcatcaaggatttggctggtagcgatatacagaacctgactagagtccccaataagcgcctctgcgtggcgactcttcccgctccgtgcgccccccgtcaccaaaatcatcataccgactcctgattcaaatgtatgatggtattcattgaacagaacaatggatcccccaccgttgctgaccgcaaaacatttacgcgattaatactgcgcgtaatataattaaaaatccagcattctcaatccattacgaaataagatggcattacggaatagccagactttctcgtgttaacgtccgacaaaatgcgtcattgacagcggtttctgtggattgacacatttcattcagataatgaattaatgctactgccggaacaaccagcaaacgggcattgtgttctgaaatccaggctattgattcaacgtcagcgacagatctgcgctgtaaaagaacttgtaaaacaacgtaatagaattatccggaatggtggcgactatgcactagggaaggtgcgaataagtggggaaattcttctcggctgactcagtcatttcatttcttcatgtttgagccgattttttctcccgtaaatgccttgaatcagcctatttagaccgtttcttcgccatttaaggcgttatccccagtttgcagaaactccgtaatgagattaaaagcgctcataactcatctgtcggccagaaggcgcgcctctgaattatccgacggacaaaccgggaacagtgtaatttcccggcaggagcgaaaaaattgaaaggcgcatcttactcttttcgctttcaaaaaaaagagtggtcatcgcgttaacacaccgccctgagatgaattagtgatgttttggctgcaccgcaacatacatttcgatatcccagtacccatcttccgcgccattgttcaaataaacctcgaagcagggctttggtaacatttcataagcactgtcctgcaagagactattaaagaactgataccagggtttagcaaaatcatcaccgactacacgagctaccgccaccgcatactgaccacctgtaatttctgtcagaatgacgccctcactgttttcgggaagcgtaaagtaacccggcaccgtcacgacggtgtcgcagcgtaatttttcggcgggtgtttcatctggattgtcgtaatagacagcaacccactccttcggcacaatatttttgctatctacccacatcatcaactgctcaaagcctttctttaccgtctgttcccacgggccaacgagatggaaacctgcaacggtacgtttctcttcctgcttaatctcgtagttcatgacgcctccattgatactgtttttatatacagtatagttgcaaaattaaaaccacaaggaatgagtgttgattatgcgagcagactcgcactcctgccagtctgctgcaaaagaaaggtcaggccttatggtggaaataatcactcaggcgagaaaacatgctgccttccccgacagattccagggtaaccagcggccagtgcgccacctgtttatcacggtcgtaaagttcaatttcccctacccgctgatgggcgctaattggcgcggtgagttctttaccatcaagggtatatttggctttgatatgtggaatttcggctttcggtagcaccatccagaactcttgttccgttcccaggtcgatattttctttatcgccataccagatgcgttccgttccgacctttttcccacggtgcaaaatttgcaccgtagtaaagttttgttgcccccaacgcagtaattttcttgcctcttcctcacgaccttttgcactgtcagcccccattaccactgcaatgagacgacgctgcccatctacagcgctagcaatgagattaaacccggcaccagaagtatgacccgttttcaggccgtcaacattcatggttttatcccacaacaacccgttacggttttgctgggtgataccgttccaggtgagacttttctcactgtacatatgataaaactcgggctcgccgtggatgatagcacgagaaagcacagctaaatcataagcgctgctatgctggccaggtgcatccagaccatgcactgtttcaaaatgcgtatccttgagatgcagcttctcggcatagttgttcatcatttcaacaaactgccgttgcccaccggcaatatagtcagccagagcaacacaagcgtcatttccggaatccacaattaaaccacggcttaaatcacgtacgcttacgcgatcgccctctttcaaaaacatcagactagaaccgacaaacaccggattatctttcgcccacgcatcgcgccccacggtgacaatatcgtctggcgtaatgcgatgactatcgatagcgcgatccacgacataacccgtcatcagctttgtcaggctggcgggattgcgctgttgatgctcattacccgcggtgaggatctgaccggtggtgtaatccatcaatacccaggacccggcatgaatctctggaggctgaggactaaaaggaatgttttccgccgcaaaaccagagcttaagttaaaaacgaacaaagaagcagcaataataagacggcgtttcaacagcaaaccctcaggagtttcaaatagctgttctttttacggaaatacttatgaactggctggaataaagtgcaagaaaatgtgactaccctctcatttttatctgacatgatctgttgccactcgctgccaaattgtggcgctaaagctgattagcacggtgatatttgatactctggcagacagcagaaataacggatttaacctaatgatgaatgacggtaagcaacaatctacctttttgtttcacgattacgaaacctttggcacgcaccccgcgttagatcgccctgcacagttcgcagccattcgcaccgatagcgaattcaatgtcatcggcgaacccgaagtcttttactgcaagcccgctgatgactatttaccccagccaggagccgtattaattaccggtattaccccgcaggaagcacgggcgaaaggagaaaacgaagccgcgtttgccgcccgtattcacagcctttttaccgtaccgaagacctgtattctgggctacaacaatgtgcgtttcgacgacgaagtcacacgcaacattttttatcgtaatttctacgatccttacgcctggagctggcagcatgataacagccgctgggatttactggatgttatgcgtgcctgttatgccctgcgcccggaaggaataaactggcctgaaaatgatgacggtctaccgagctttcgccttgagcatttaaccaaagcgaatggtattgaacatagcaacgcccacgatgcgatggctgatgtgtacgccactattgcgatggcaaagctggtaaaaacgcgtcagccacgcctgtttgattatctctttacccatcgtaataaacacaaactgatggcgttgattgatgttccgcagatgaaacccctggtgcacgtttccggaatgtttggagcatggcgcggcaataccagctgggtggcaccgctggcgtggcatcctgaaaatcgcaatgccgtaattatggtggatttggcaggagacattagcccattactggaactggatagcgacacattgcgcgagcgtttatataccgcaaaaaccgatcttggcgataacgccgccgttccggttaagctggtgcatatcaataaatgtccggtgctggcccaggcgaatacgctacgcccggaagatgccgaccgactgggaattaatcgtcagcattgcctcgataacctgaaaattctgcgtgaaaatccgcaagtgcgcgaaaaagtggtggcgatattcgcggaagccgaaccgtttacgcctagtgataacgtggatgcacagctttataacggctttttcagtgacgcagatcgtgcagcaatgaaaattgtgctggaaaccgagccgcgtaatttaccggcactggatatcacttttgttgataaacggattgaaaagctgttgttcaattatcgggcacgcaacttcccggggacgctggattatgccgagcagcaacgctggctggagcaccgtcgccaggtcttcacgccagagtttttgcagggttatgctgatgaattgcagatgctggtacaacaatatgccgatgacaaagagaaagtggcgctgttaaaagcactttggcagtacgcggaagagattgtctaatttgaagcctccgccgctggtacggcggaggacaatgttgagtcaggctttttgaacggtgatgctccacgctgcatcgccaatctgctgataatcggtgatggcatgtccttcttctgccgcccactgtgggattgcttcagttgcctgggtgcaatcaaactcaatcactaactcatcgccgctgaccatttctgccagagctgcttttgcttctatgagtggaaacggacagacctgcgtcaccacatccagctttttaatcaccatctttacaccttacttaatttgccgcagcagttgccagtcgcgccttacgctgcggtcgaacatacacaagccaggacgcagtccagactccgagaatcataaatacaaggccaatccagccctgccaggtcatcattgcagtcataaccagtccattaccgatagagcaaccacctgcaatactggcaccgaagcccatcagtacaccacctaacccgctacgtaatgttgtttgtgcatcagctgcgcgaacgcggaactcacggctcgctttggctgcaataaaactccccacgaagatccctaacaccaggaaaacgccccagttaatgtatttcatgtcacccgcgaccagaaattgcagaatattggccgttggggaagtgattcctaacccaaacatgcgtccggttgcttcactcaggggccaggctaaaagcgcaatcaaaccgatgagtacagctgtgacaaagggatgccagcgtttttcaaacagaatatgagcgatcccggttcggcgcggcggtaaggtcgcgactttgagttttggcttcttcaactctttcatcaccacccagagcgttatcaccagcaaaacggcaaccaacggccacacagacaaattaaaagtctcagcaatagagttatgttcagtactgtagtgctgcaaggtttgatttaaaccactggcatgtggagaacgcatcaccgcactcatcaccatataagtgaaaagcgcgatccaactgccgatcaatccctcacccgcgcgataccaggtcccggtggcacatccacccgccagaacaattcccagcccgaagatatacccacctataacagtaccaagccacgggaacgccccggcttcgtaagtcagtaggcccgcctgaattaacgcaaaaacccccacgctttgtacgctaattgcaatcagcaaggcgtaaaacatgcgattatttttcacgatatacatatcgcgaaaaccacctgtcaggcaaaaacgcccacgctgcatgacaaatcccagcagagcaccacaaattagcccgcttaatatcatactaaacataaattaattaaccagatgaatgttaatgaggaaattattcatgactggtggaatgcagaccaataaccaaattctctaaattagaacaaatggttattaatgaggagttcgatacaaaagaataaaaaaaccggagccaaatgttcattcgactccggtttattattagaaaagatgattatgctacgtcttcgtactgcggaaccggattacggaagctcttggtgacgcaagccaggtaaatcagaccgatagcagcccagatcagacccagaaccatactgctttcttccaggttaacccacagcgcaccaacggtcagcgcaccacacatcggcaggaacagatactggaagtgatctttcagcgtcttgttacgcttctcacggatccagaactggctgatgacgctcaggttaacgaaagtgaacgccaccagcgcaccaaagttaatcagcgccgttgccattaccaggtcgaagttgattgccagcagggcaatcgcgccaaccaggatgatgttcatcgccggagtacgccatttcgggtgtacataaccgaagaagcttttcgggaatacgccgtcacgacccattacgtacatcagacgcgctacgcctgcatgcgccgccataccggacgccagtacggtaatggtggagaagatcagcgcgccaacctggaacgctttacccgcaacgtacagcatgatttcaggctgactcgcatccggatctttaaagcgagagatatccgggaagtacagctgcaggaagtaagttgcaaagatgaagatcatgccgccgatcagcgcggtcaggaaaatcgcacgcgggatcacgcgctctgcatctttggtttcttcgctcaggttgctgatgccgtcaaagccggtaaaggagaagcacaggattgtcgccccggtaatcatcgggataacatgcgcatcgccagaccagaatggacgagtgctcgccagcgtaccagcgccttcaccttcaaatacgccataaacaaccatgcccagaatcaccgcgatcagcactacctgcaacacgacgattacagtgttgaagttcgctacggatttcagactacgcaggttaaaggcggtcataaaggccaccagcgccaccacaaacatccagcttgggatggaaggcaccagagcttcaaaatagattttcgccagtagaatgttgatcatcggcgcgaacagatagtcgagcagagaagaccaacccaccataaagccgacagtcgggctaatggatttctgggcgtaagtgtatgcagagccagcagaaggatagcggcgaaccagcttcccgtagctcagagccgtaaacaggatcgcaatcaatgcgaacgcataggctgtcggcacatgaccatccgtgaggccactaacgataccaaaagtatcaaacagcgtcatcggctgcatataggcaagacccatcattacaaccggaactaacgtaagcgttttacgcaattccacgcgagaggtgtttggagtaacgttatggctcatggtcattctcctttacggtgataaccgtcgcgtaagcaaaaaattgccccatttttttggattcctcagcgacaacaactgtcgatttttagtaaatatctatccggtacgaagcccggcctcttggtatgaatgattggtttgaagcaaaaaataaccgacgctgatgaaacgtcggtttttagtcattttttgacagcggcgcattgtgcctaaatgggggggaaatgacaagagaatgagaggcttgtcagaataatttttctttaaatggcactttttccgtcatcagattttgcataaacaccggcgatcgcactatttgctaaaatttcatcccgccaccagccactggcaagtcctgcggtctgttcgttccagccaatccagacgggttcaaagagagtttgggcgaccactttcttctcgattaacgcgccactatcgagaaaacgttgcgccagataacggggtaaatagccgcagccgaggccgctaatttgcagctccagtttggttttaaaatcgaaaacggtaatggcttcttgttcgtcgagaagttgacttgccgtagaagcgcctgcctgcgcagtatcccccaccacaatcgcccgatatcgcttaataatacgacgatttaacggctcttcttccagggctaacggatgatgaggcgcgaccgcaaagacttgttccagatcgcccaaccgactaaaaccaaactcactggaagatggtggctcatgcatcgcgccaacaataatatccgctcgcccctgagtcagggcatcccaactaccaccgagtacgccattgataaacttcaggcgcgtcacgctatgatgttgataaaaagcttcaatgagtggcgcaagcagagaaaaaggaaacgtgtcgtccacgccaatcaccagctcgttttcccagccttcatgcagtttgatcgcctgcttttccagttcccgcacggtatgcagaacttcccgccctttctctaataacatttttccggtgcgggtgaatttagcgcggtgtccgctacgatcaagcaattgaatattaaggtcgctttccagcttgtgaacggtgtaactcagagcggacggcgtcttgtagagtttggcgctcgccgccgcaaaactgccttctttttctaaggcatcgaggatcatcaacacatccagcagtggtttcatacacgcccccttgcagtgcatgcggcgtcctgctggcgtgatcgtttactccagcggcattaccagcggatcgggatactggtattcaaatcccagttcattacaaatccgactgccatcaataatcttacctttgccgctgtccagactatttctgaactgcggaggttccagccccagtaaacgggccatctgcggatagaaaacattacgcgcagggtgagctggcgcacatatattatagatgtgtccgcctttaggtgcctgtaacaacagagtgatagcgccaataacatcttctaaatggactaaattaacaccatgttcaccatcaggcgcggtttttccggcaaagaagcgtccgggatgacgtcccggtccgaccaggcccgcaagacgcagaatatcgacgctagtaccgggtaaattgtgcagccagtcttcgagttcttctaatactcgtccactgttggttactggattacgcggggtggtttctttcaccgtgccttgcgcgtcgccatagacagatgtactgctggtaaaaataatgcggggaatacgatgggccagcgcgctatccactaactcttgtaccgcttgtaaatagaactcatcgccggggccgctacgacgtgccggaagcgtaatgaccagcgcatcggcatccatcagggcatccagatcgtcagaatcgcaaactagctcaggctccatgcgaagcagatagctatcaatgccactcattcgggccgcttcgacaccatcttgtgtggttttactcccggtgacttgccagcctcgcgcactaagactcatcgccagcggcatgcctaaccaccctaacccgacaattgcgacctttttcatccgttatctcctgatacaccttagatctataaggctacgctagcgtatcaaaactgacaattcattctatgaatgaatctgttcaataatgataacgacatgctgcaatgagcagactatcgtcggtaaccgcgtataccagacggtgctcctctgtaatgcgtcgggaccagaaaccactcaaattatgtttcaggggttctggcttccccttaccttcaaatggcgttctgcgggtatctttgataagttcattgatctttttaacaattcgcttatctgtttcctgccagtacagataatcgtcccaactttcctcagaccagattagtttcactcaatgatgtccttttccgttcctttgccacttttcaggctatcgatactgtccatcaatctccgggcgttagcgggggagcgcagtagataagccgtctcttccaggctgttgtattcttcgagactcatcagaacacaagcctctccattctgacgagtaataaggatcggggcatgatcttcaacggctttcatcattgttgcgctcaaattctgacgcgcttcgctgtagctaattgtacgcatgtcaatctcctcttttgtacagttcattgtacaatgatgagcgttaattaactatttattaattagtttgtagatcaaggtattgtcagtgagacgaaaatccaggcttcgctatttttggtgccatcagctaagaggacagtcctcttagccccctcctttccccgctcattcattaaacaaatccattgccataaaatatataaaaaagcccttgctttctaacgtgaaagtggtttaggttaaaagacatcagttgaataaacattcacagagacttttatgacacgcgttcaatttaaacaccaccatcatcaccatcatcctgactaatctttcaggcgatgtgtgctggaagacattcagatcttccagtggtgcatgaacgcatgagaaagcccccggaagatcaccttccgggggcttttttattgcgcggttgataacggttcagacaggtttaaagaggaataacaaaatgacagacaacactcgtttacgcatagctatgcagaaatccggccgtttaagtgatgacagtcgcgaattgctggcgcgctgtggcattaaaattaatcttcacacccagcgcctgatcgcgatggcagaaaacatgccgattgatattctgcgcgtgcgtgacgacgacattcccggtctggtaatggatggcgtggtagaccttgggattatcggcgaaaacgtgctggaagaagagctgcttaaccgccgcgcccagggtgaagatccacgctactttaccctgcgtcgtctggatttcggcggctgtcgtcttagcctggcaacgccggttgatgaagcctgggacggtccgctctccttaaacggtaaacgtatcgccacctcttatcctcacctgctcaagcgttatctcgaccagaaaggcatctcttttaaatcctgcttactgaacggttctgttgaagtcgccccgcgtgccggactggcggatgcgatttgcgatctggtttccaccggtgccacgctggaagctaacggcctgcgcgaagtcgaagttatctatcgcagcaaagcctgcctgattcaacgcgatggcgaaatggaagaatccaaacagcaactgatcgacaaactgctgacccgtattcagggtgtgatccaggcgcgcgaaagtaaatacatcatgatgcacgcaccgaccgaacgtctggatgaagtcatcgccctgctgccaggtgccgaacgcccaactattctgccgctggcgggtgaccaacagcgcgtagcgatgcacatggtcagcagcgaaaccctgttctgggaaaccatggaaaaactgaaagcgctgggtgccagtagtattctggtcctgccgattgagaagatgatggagtgatcgccatgagctttaacacaatcattgactggaatagctgtactgcggagcaacaacgccagctgttaatgcgcccggcgatttccgcctctgaaagcattacccgcactgttaacgatattctcgataacgtgaaagcacgcggcgatgaggccctgcgggaatacagcgcgaagtttgataaaaccacggttaccgcgctgaaggtgtctgcagaggagatcgccgccgccagcgaacgcctgagcgacgagctaaaacaggcgatggcggtggcagtaaagaatattgaaaccttccacactgcgcaaaaactgccgccggtagatgtagaaacgcagccaggcgtgcgttgccagcaggtcacgcgtccggtagctagtgttgggttgtatattcctggcggctccgccccgctcttcagtacggtattaatgctggcgactccggcgagtattgcgggctgtaaaaaagtggtgctgtgcagtccgccgccgattgccgatgagatcctttatgcggcgcagctgtgcggtgtgcaggacgtgtttaacgtcggcggcgcacaggccattgccgcactggcgtttggtacggaatctgtgccaaaagtggacaaaatcttcgggccgggtaacgcctttgtcaccgaagcgaaacgtcaggtgagccagcgtctggacggtgcggcgatcgatatgcccgcaggcccgagcgaagtgctggtgattgctgacagcggcgctacgccggatttcgtggcttctgatttgctctctcaggctgaacacggcccggacagtcaggtgattttactgacgcccgctgctgatatggcgcgtcgcgttgccgaggccgtcgaacgccaactggcagaactgccgcgtgccgaaaccgcccgccaggcactgaacgccagccgcctgatcgtgactaaagatttagcgcagtgcgtggagatctccaaccagtacggcccggagcacctgatcattcagacccgcaacgcccgtgaactggtcgatagcatcaccagcgccggtagcgtatttcttggtgactggagtccggaaagcgcaggtgattacgcctccggcaccaaccacgttctaccgacttacggttacaccgccacctgttccagcctcgggctggcagatttccagaagcgcatgaccgtacaggaactgagcaaagaggggttctccgcgctggctagtaccatagaaacactggccgccgccgagcgcctgaccgcccacaaaaatgccgttactttgcgtgttaacgcccttaaggagcaagcatgagcaccgtgactattaccgatttagcgcgtgaaaacgtccgcaacctgacgccgtatcagagcgcgcgtcgtctgggcggtaacggcgatgtctggctgaacgccaacgaataccccactgccgtggagtttcagcttactcagcaaacgctcaaccgctacccggaatgccagccgaaagcggtgattgaaaattacgcgcaatatgcaggcgtaaaaccggagcaggtgctggtcagccgtggcgcggacgaaggtattgaactgctgattcgcgctttttgcgaaccgggtaaagacgccatcctctactgcccgccaacgtacggcatgtacagcgtcagcgccgaaacgattggcgtcgagtgccgcacagtgccgacgctggacaactggcaactggacttacagggcatttccgacaagctggacggcgtaaaagtggtttatgtttgcagccccaataacccgaccgggcaactgatcaatccgcaggattttcgcaccctgctggagttaacccgcggtaaggcgattgtggttgccgatgaagcctatatcgagttttgcccgcaggcaagcctggctggctggctggcggaatatccgcacctggctattttacgcacactgagcaaagcttttgctctggcggggcttcgttgcggatttacgctggcaaacgaagaagtcatcaacctgctgatgaaagtgatcgccccctacccgctcagcacgccggttgccgacattgcggcccaggcgttaagcccacagggaatcgtcgccatgcgcgaacgggtagcgcaaattattgcagaacgcgaatacctgattgccgcactgaaagagatcccctgcgtagagcaggttttcgactctgaaaccaactacattctggcgcgctttaaagcctccagtgcggtgtttaaatctttgtgggatcagggcattatcttacgtgatcagaataaacaaccctctttaagcggctgcctgcgaattaccgtcggaacccgtgaagaaagccagcgcgtcattgacgccttacgtgcggagcaagtttgatgagtcagaagtatctttttatcgatcgcgatggaaccctgattagcgaaccgccgagtgattttcaggtggaccgttttgataaactcgcctttgaaccgggcgtgatcccggaactgctgaagctgcaaaaagcgggctacaagctggtgatgatcactaatcaggatggtcttggaacacaaagtttcccacaggcggatttcgatggcccgcacaacctgatgatgcagatcttcaccagccaaggcgtacagtttgatgaagtgctgatttgtccgcacctgcccgccgatgagtgcgactgccgtaagccgaaagtaaaactggtggaacgttatctggctgagcaagcgatggatcgcgctaacagttatgtgattggcgatcgcgcgaccgacattcaactggcggaaaacatgggcattactggtttacgctacgaccgcgaaaccctgaactggccaatgattggcgagcaactcaccagacgtgaccgttacgctcacgtagtgcgtaataccaaagagacgcagattgacgttcaggtgtggctggatcgtgaaggtggcagcaagattaacaccggcgttggcttctttgatcatatgctggatcagatcgctacccacggcggtttccgcatggaaatcaacgtcaaaggcgacctctatatcgacgatcaccacaccgtcgaagataccggcctggcgctgggcgaagcgctaaaaatcgccctcggagacaaacgcggtatttgccgctttggttttgtgctaccgatggacgaatgccttgcccgctgcgcgctggatatctctggtcgcccgcacctggaatataaagccgagtttacctaccagcgcgtgggcgatctcagcaccgaaatgatcgagcacttcttccgtagcctcagttacaccatgggcgtgacgctacacctgaaaaccaaaggtaaaaacgatcatcaccgtgtagagagtctgttcaaagcctttggtcgcaccctgcgccaggccatccgcgtggaaggcgataccctgcccagcagcaaaggagtgctgtaatgaacgtggtgatccttgataccggctgcgccaacctgaacagcgtgaagtctgccattgcgcgtcacggttatgaacccaaagtcagccgtgacccggacgtcgtgttgctggccgataaactgtttttacccggcgttggcactgcgcaagcggcgatggatcaggtacgtgagcgcgagctgtttgatctcatcaaagcctgtacccaaccggtgctgggcatctgcttagggatgcaactgctggggcggcgcagcgaagagagcaacggcgtcgacttgctgggcatcatcgacgaagacgtgccgaaaatgaccgactttggtctgccactgccacatatgggctggaaccgcgtttacccgcaggcaggcaaccgcctgtttcaggggattgaagacggcgcgtacttttactttgttcacagctacgcaatgccggtcaatccgtggaccatcgcccagtgtaattacggcgaaccgttcaccgcggcggtacaaaaagataacttctacggcgtgcagttccacccggagcgttctggtgccgctggtgctaagttgctgaaaaacttcctggagatgtgatgattattccggcattagatttaatcgacggcactgtggtgcgtctccatcagggcgattacggcaaacagcgcgattacggtaacgacccgctgccgcgattgcaggattacgccgcgcagggtgccgaagtgctgcacctggtggatctgaccggggcaaaagatccggctaaacgtcaaatcccgctgattaaaaccctggtcgcgggcgttaacgttccggtgcaggttggcggcggcgtgcgtagcgaagaagatgtggcggcgttactggaagcgggcgttgcgcgcgtagtggtcggctccaccgcggtgaaaagtcaagatatggtgaaaggctggtttgaacgcttcggtgccgatgccttagtgctggcgctggatgtccgtattgacgagcaaggcaacaagcaggtggcagtcagcggctggcaagagaacagcggcgttagtctggaacaactggtggaaacctatctgcccgtcggcctgaaacatgtgctgtgtaccgatatcagccgcgacggcacgctggcaggctctaacgtctctttatatgaagaagtgtgcgccagatatccgcaggtggcatttcagtcctccggcggtattggcgacattgatgatgtggcggccctgcgtggcactggtgtgcgcggcgtaatagttggtcgggcattactggaaggtaaattcaccgtgaaggaggccatcgcatgctggcaaaacgcataatcccatgtctcgacgttcgtgatggtcaggtggtgaaaggcgtacagtttcgcaaccatgaaatcattggcgatatcgtgccgctggcaaaacgctacgctgaagaaggcgctgacgaactggtgttctacgatatcaccgcttccagcgatggccgtgtggtagataaaagctgggtatctcgcgtggcggaagtgatcgacattccgttttgtgtggcgggtgggattaagtctctggaagatgccgcgaaaattctttcctttggcgcggataaaatttccatcaactctcctgcgctggcagacccaacattaattactcgcctggccgatcgctttggcgtgcagtgtattgtggtcggtattgatacctggtacgacgccgaaaccggtaaatatcatgtgaatcaatataccggcgatgaaagccgcacccgcgtcactcaatgggaaacgctcgactgggtacaggaagtgcaaaaacgcggtgccggagaaatcgtcctcaatatgatgaatcaggacggcgtgcgtaacggttacgacctcgaacaactgaaaaaagtgcgtgaagtttgccacgtcccgctgattgcctccggtggcgcgggcaccatggaacacttcctcgaagccttccgcgatgccgacgttgacggcgcgctggcagcttccgtattccacaaacaaataatcaatattggtgaattaaaagcgtacctggcaacacagggcgtggagatcaggatatgttaacagaacaacaacgtcgcgaactggactgggaaaaaaccgacggacttatgccggtgattgtgcaacacgcggtatccggcgaagtgctaatgctgggctatatgaacccggaagccttagacaaaaccctcgaaagcggcaaagtcaccttcttcagccgcactaaacagcgactgtggaccaaaggcgaaacgagcggcaatttcctcaacgtagtgagtattgccccggactgcgacaacgacacgttactggtgctggcgaatcccatcggcccgacctgccacaaaggcaccagcagttgcttcggcgacaccgctcaccagtggctgttcctgtatcaactggaacaactgctcgccgagcgcaaatctgccgatccggaaacctcctacaccgccaaactgtatgccagcggcaccaaacgcattgcgcagaaagtgggtgaagaaggcgtggaaaccgcgctggcagcaacggtacatgaccgctttgagctgaccaacgaggcgtctgatttgatgtatcacctgctggtgttgttgcaggatcaggggctggatttaacgacggtaattgagaacctgcgtaaacggcatcagtgagttgcggggtaagcggatgcgatattgttgccgcatccggcaaaaaaacgggcaaggtgtcaccaccctgccctttttctttaaaaccgaaaagattacttcgcgttgtaattgcgtagagcattacgccccagcacaatccccgcgccaaccatgccacccagcagcaccgccagaatcaaggtaattgcctttttcgggctatcacgacgaataggtaacatcggtttcatcacataacggtaagcatgaatatcaagatcatcaacttttaagctttcgatatccagcaggttttgacgagtctgatagtagtttgggctgaacaccaacggacgggtcgcctcatgcttaatcatgctctccagcgcttcgctccccaaaaggaacaacgtatcttgtgtgatatcttcgccagtctgttgaatctgcggttttgtcacctgcgcctgattcgcatactgcaacgcttcctgaatctgacggatacgcagatctttctgctcctgcgcgactacttcctgcgttcttaaagagtcctgcaagtttttccgtcccagagcaatgttgtctttgagatccttttctagctcttgattcactttatcgtcaacttgctgaatgtattgggccaacttcatttgtgcgccctctgcagtttgcccaacataagaaacagtcaatggtaattgctggttcttaacagaaggttcgatggtaagtttttctcgttcttcctgattatccagcgtttctgctaatgcagagaaggcagaactgaagcgaccaattaacgtctcctgcaaatcgcttactttcggtgcagcctgaccatagataacattcatggcattgttatagccagcaatttgccccacgtcgggctgagtgataattgctgtactcgtccatttctccttcgctactgccaaatatccaatagccagggcaatagccacaatgacggaaatgatgattgtcatcttgccacgccacaactgcactagtaaatcaatcaaatcaatctgttccgggtcatggttttgcccagaaacattattattttctactctcatcattaccctaactgacggaaatttccaagtccgcatagtttagcgataatcctcgtgaatgctataggataagtgataaaaataatgaattgttgtgtaagtaacaaaagacaatcagggcgtaaatagccctgataacaagatgttagtcgctgccaaagagatcgcgggtgtataccttatctgccacatccttaagctcttctgccattcggttagagataatgacgtcggcttgttgtttgaaggtggcgagatcacgttccaggcgagagttgaagaaactgtcttctttcatcactggctcgtagatgatcacttcaacacctttcgccttgatacgtttcataatcccctgaatagaagacgcacggaagttatcactaccgctcttcataatcagacgataaatacccaccacttgcggcttgcgactcaaaatggcatcggcaataaaatctttacgcgtgcggttagcatcgacaattgcgctgatcaggttattcggcacagactggtagttcgccagtaactgcttggtatctttcggcagacaataaccaccataaccaaagctcggattgttgtaatggttgccaatacgtgggtcgagacaaacgccttcgattatttgacgggaattcagacctaaactttctgcatagctatccagttcgttaaagtacgccacgcgcatcgccaggtaggtgtttgcaaaaagtttaatcgcttctgcttcagtggagtcggtaaacagcatcgggatattttgcttaatcgcgccttcctgtaacagagcagcgaaacgttctgcgcgttcactacgctcaccgatgacaatacgactaggatggagattatcgtaaagggctttaccctcacggagaaattccggggagaatataatattttcagtgcgatatttcttatgcatcgctgcggtaaaaccaacgggaaccgtacttttgatgaccataaccgcataaggatttatctcaactacgtctttaattacactttctacactggatgtattgaaataattagttttaggatcatagtcggttggagtggcgatgatgacataatcagcatcccggtaggcttcatttttatctaatgtggcattaaagtgtattttatcactttgcaaaaactgctgaatttccttatcaacaataggagatatccgatcattcagcatagcaacgcgactcggtaaaatatctaatgccacaacctcatgattttgtgcgattagaagcccgttactcaagcctacatagccagtaccggaaatggtgattttcatttcatgctctcagaattaacttaactgtgaatcatgatgtttttagcatcctgataagagctaaaagttttaacgctacgttgttcgatggtcaacgcaacgaaaaacaattcagattttctttataagaatagctgatatttattaagttaatattaagcagtgaaatttagtctataagatatttggcaaaaaaaagcccggtgcaatatacgccgggcctcaattttattgttggttaaatcagattaatccagccattcggtatggaacacaccttctttatcaatacgcttataagtatgcgcaccaaaatagtcacgctgtgcctggatcaggttcgcaggcagaacagcagcacggtagctgtcgtaataggcaaccgctgcggagaaggtcggaaccggaataccgttctgtactgcataagcaacgacatcacgcagcgcctgctggtagtcatcggcaatttgcttgaagtacggagccagcaacaggttagcgatctgtggattttcggcataagcatcggtgattttctgcaggaactgcgcacggatgatgcagccagcacggaaaatcttcgcgatttcgccgtagttcagatcccagttgtactcttcagacgcagcacgcagctgagagaagccctgggcgtaagaaacgattttgcccagatacagcgcacgacgaactttttcgatgaactcagccttgtcgcctgctggctgtgcttgcggaccagagagaactttagatgcggcaacacgctgatctttcagagaagagatataacgtgcaaacacagactcggtaatcaggctcagcggttcgccgagatccagcgcgctctggctggtccatttaccggtacctttgttagccgcttcatccaggatcacatcaaccaggtagttaccgtcttcatcttttttggtgaagatatctttggtgatgtcgatcaggtaactgctcagttcaccgttattccactcggtaaaggtctgcgccagttcttcgttggtgaggttcaggccacctttaagcagagaataggcttcagcaatcagctgcatatcgccgtattcaataccgttgtgaaccatcttcacatagtgacctgcgccatcggcaccaatataggtaacgcatggttcaccgtcttcagctacggcggcgattttggtcaggatcggtgctaccaattcataggcttctttctggccaccaggcataatagaaggacctttcagcgccccctcttcaccgccagaaacaccggtaccgatgaagttaaagccctctgcactaagctcacgattacgacgaatagtgtcctggaagaaggtgttaccaccatcaatgatgatgtctcctttatcgagatatggtttgagggaatcaatagcagcatccgtgcctgcacctgctttcaccattaacaggatgcgacgaggcgtttccagagattcgacaaactctttcaccgtatagtaaggaaccagtttcttgcctggattttcggcaatcacttcttccgtcttctcacgggaacggttgaaaatagagacggtataaccacggctttcgatgttgagcgcaaggttgcgtcccatcactgccataccgactacgccgatctgttgcttggacattacatactcctgtcaggtgtgatcaccgcgctgaatgctcgcggcctggaatgttcgcaaataagtatacaaagtacttattaaagtataaatagcttatccatgcttatatgcttacggctttatatgtctccacatgcgatatttcttaaataatgttttattattaccacttttaattcagggataatgtgaggttattaccctcaaataatatgagataaatagtgctgcaacattgcatttttgccccgatttatccatgatcgaattgtgacatttgtcatacaacgaataggttttgtacttactatggaatggattgccgatccgtctatctgggccgggttaatcacgctgattgtgatcgaactggtcctcggcattgataacctggtctttattgccatcctcgccgaaaaactaccgccgaagcagcgtgaccgcgcacgggttaccgggctgctgctggcaatgttaatgcgcctgttactgctggcgagtatctcctggctggtcaccctgactcaaccgctgttcagcttccgcagctttacctttagcgcccgcgacttaatcatgctgtttggtggtttcttcctgttgttcaaagccacgatggagctgaacgaacggctggaagggaaagacagcaataatcccacacaacgcaaaggtgcgaagttctggggcgtggtgacgcaaattgtggtactggacgccattttcagtctcgacagtgtgattaccgccgtcgggatggtcgaccatttactggtcatgatggccgccgtggttatcgctatcagcctgatgttgatggccagcaagccgttaacgcaatttgttaacagtcacccgacgatcgttattctctgcttaagcttcctgttgatgattggctttagcctggtggcagaaggtttcggcttcgtcattccgaaaggctacctgtacgctgccattggtttcagcgtgatgatcgaggcgctcaatcagttggctatctttaaccggcgacgttttctttccgctaaccagacgctgcgccagcggactaccgaagcggtaatgcgcctgcttagcgggcaaaaagaagatgcggaactggacgccgaaaccgcgtccatgctggtggatcatggtaaccagcagatctttaatccgcaggaacggcggatgattgagcgggtacttaatcttaaccagcgtaccgtcagcagcattatgacgagccgccacgatattgagcatatcgatctcaacgcgccggaagaagaaatccgccagttgctggagcgaaatcagcatacgcggctggtggttaccgacggtgatgacgcagaagatttgctcggtgttgttcacgttatcgacctgctacaacagtctctgcgcggcgaaccgctcaacctgcgggtgttgattcgccagccgctggtgttcccggaaaccttgccgttgttacctgccctggagcagttccgtaatgcccgcacgcactttgcttttgtggtggatgagtttggcagcgtggaagggattgtgacattaagtgacgtcactgaaaccattgccggtaacttaccgaacgaagtggaagagatcgacgcccgccatgatattcagaagaatgcggacggttcctggacggcgaatggtcatatgccgctggaggatctggtgcaatatgtgccgctgccgctggatgaaaaacgtgaatatcacaccattgccgggctgttgatggagtatttgcagcgtattccaaaacctggcgaagaagttcaggtgggggattatttgcttaaaacgttgcaggtagaaagccatcgcgtgcagaaggtgcagattataccgctgcgtaaggatggcgagatggagtacgaggtgtgatggtatcggtcattttacccaatagccgaaaggaataagatgagggaaccgcgccatcggcgatttaccgccgggagcccgggttgccagggtggtggagattgagccaccctggcacgttcaccggcttgagcgttccatagtagcgaggaacatcaagtgaacggaacagccttcgatcttacatattcagaatataatgatgccgccacgaacgcctgatgcgacgctttacgcgtcttatcaggcctacaggactggtcacctggtaacttacatcttctccagcaacttcttcacatctttgccattacgggaatctttattccgctcggcccagtcattcaggcgacgtttcgcttcgtcctgtagatgtttgcgcagtaactgatccacttgcaggctgtaattgagttgctgccagttgccataaacccgcagcggtactggcgtttctttcaggaaatcaatcagtttgctttccccgttccagccacccacgacccgaatatcaaactgggtgtcgcaggtttgatctgccagattcaacatgccttcccctgtcagcgccagcacagggctttgaccttgcatgtcgtttaacgtcacgacgccatccttcaacgtcaaatcggtggtaaagcggtcaagccgcgtcacgttatcaaagttttcagcggccttcacatcaccgccattacgctctaccgcttgctgaatcatctgctggaagttcatcccttccatgcgcgtgtcggtcatttcgacatgtgcctgtccttgccagttgtggcggaatgcgtcggcatctatgtcagcaccggagaaatcaccagccagactcatttttccggtcaagctaatcggatagttaaacgccttcagaatggtaccaatctcaacgttttccagccgtggctggaagtttatccgcggatttatacttgtcgcgtccagcgtgcccggcagactaacctgtccaccgttaagtttgccctgcagttgagtaatttccagcaaaccgctcttgttggtcatttgcgtggcaacatctgtaaaattcattccgcgccagcgcacgttactggcctgcaacaaaatatcagccgtaaagccttgcagtccctgataggccggttcatcaatacggctagaaatgaccgggcgcggcaacgtactttggctctgcccctgctgcgcggcaccgttttcaccattcgcggtttcattaagcgggatgaggttgtcaagattcagttgcgggaattgcagcctcagctgccattccggtttctctgtcagcgtaacctgtgcttgcccgcttagcgtactatcattggcggtcaaactaatttggttaaaactaaggcgtttatgactctcctgccactgggcctggaaactcccctgcccctgaataccttgttttggtaaatcggcaccctgcaactgccagttaatttgttcaatagccgccgttaaatcatgcggataatcagaagcatctaccgtaccgttaagggatatcgtgagatcgcgctgatcgcgattaacccgcccggagaactcaaaactaccacgatgttggggatcttgttccatttgcaggcgaatattgcggattgtcacctgctcgtcatcttcatgctggaacaccagcacgctgtccgccaccttaagactggatatatcaaagctccatccgcgatcgtcactcagatccggcaaggtattgtcgcgcggtgcaaccggagcgtcttcactgcgcaccgcttccgtctgcggcgtcagttggatcactgccccttttagcatcacctgcttaacgctcagttgatgactcagtagtggtaaaagcgccacgtccagacgcatgttgtcggcgcgaaccagtggctggcttgcgccctgggcggtgagagacattcgcccggagaggatactaagctgcggccagacgtgccaacgcagtggcccgtcgagctgcaattgataaccgctacgtgcagcaacttgcttgaccatatagtcgcggaaatcattcggattcaccagcaacactaacgcagataacccggccaccagcacgaccaggagtatcatcagcgtcgtcagaaatcgtctcatggtatcctcaatgggcctgaattagtctttatcgattcggctggctaccgcgccctgctggttgcgatatttcgcatcttcacggcggttgtaaggtcgcaccgccgggccggaaagcggctcaaagctcagcgcaccaattaacatgcccggacgcagcgccagcggcagcttaccggagttgtagaactccagcacaatgcaaccagaccagcccggatcgatgcggtgcgcggtgacgtgcaccatcagccccagacgcgccagactggaacgcccgtccagccagcccaccagatcggctggcagcgtcacgctctccagcgtcaccgccagcgccagctctcctgggtgaagatagaacgcctcgccctcgtcgagaacgatctcatcgctcatcacgcggtcaagcgcggcgctcacttcatctttgggaccgctcagatcgataaacgctgccgtgtgaccacggaaggtacgaaatttattgcccaggcgtacatccaccgtcgcgccgttaatacgctccactggcggacgtgggttgatgctcaaacggccttcatcaagccaggcttcaatatctcggtcacacagacgcatggcattttctcctttcgcgcatcactcccttaacgccaattacgtcaagggcatactaggttatcactgaacggtacacaatttatcaagcttattcaaagaactgacttattttcgctttcaatatatcgatcgcgatgcggtttttcccgccgcgcggcacgataatgtccgcatattgtttagaaggctcaatgaattgcaggaacatcgggcgcacggttttttgatattgcgccatcacactatccatactacgcccacgctcgttaacgtcacgcttgatgcggcgcatcaggcagatatccagcggggtatcaacgaaaatggagaagttaagttcgtcacgcaaacgcgcatccgtcagcaacaaaatgccttcgagaatgatgaccttcttcggctcaaccgtcaccgtttctttcatacgcgtatgttcaacatagctgtaaaccggcaggtcaattgcgctgccgcgtttcaacgcttgtaaatgctcaagcagcagactgtgatccatcgcgctgggatggtcgtagttggtcttaacgcgttcttccatgctcagatggctttgatctttgtaatagcagtcttcgggaattacgccgatgtgttcatcaccgacttgctcacgcaattcacgataaagggtactggcaataagactcttgccggaagcgcttgcgccagcgataccgataatgacgcactgatgagactgatcagtcatatatttagcgacctgattaacctggatgttaggaagggggcgacgaagcgccaaacgcggcaattatagggatttcatccgtctgataccagtcgaatagcgttgccgcgcgctcagagttaattgttgacaaagaattcccgggggcaaattacgttgatcagttttatgtaaggtaaaaaatgttaaacgcagttgcgcaaattatccgcctttacgtcactttatgagcaattcgcatataaaatgtaaaacttttgtactagcataaacacagaaacgaatactggcgaccaggtcttgcggataaagcggtaatgagcaaacaaagtcagcatgtattaattgccctgccccacccgctgcttcacctggtcagtttaggtttagtcagctttatctttacccttttcagccttgagcttagccagtttggcacccaactcgccccactgtggttcccgacgtccatcatgatggtggcgttttatcgccatgccgggcgcatgtggccgggaattgcgctgagctgtagcctgggaaatatcgccgcatccatcctgcttttttccaccagcagcctgaacatgacctggacgaccatcaatattgttgaagccgtggtcggggcagtgctgctacgtaaattgctgccgtggtataaccccttgcaaaatctggctgactggctgcgtctggcactcggcagcgccattgttccgcctctgttggggggtgttctggttgtcctgctgacgcccggagacgatcctctcagggcatttttgatatgggtactgagtgaatccatcggcgctctggcactggtgccgctgggattgttatttaaaccacactatctgctgcgccatcgcaacccacggttgctttttgagagcctgctcacgttagccatcacactgacgttaagctggcttagcatgctgtatctgccgtggccttttactttcattattgtgctgttgatgtggagcgccgtgcgtctgccacgaatggaagcctttttgatcttccttaccacggtgatgatggtgagcctgatgatggccgcggatccccccctgcttgctacgccgcgtacgtacctgatgagccatatgccgtggctaccgtttttgctgatcctgctgcccgccaacatcatgaccatggtgatgtatgcctttcgtgcggaacgcaaacacatttccgaaagcgaaacccactttcggaacgcgatggaatattccgctatcggtatggcgttagtgggcaccgagggacaatggctgcaaaccaacaaagcgctctgccagtttctcgggtacagtcaggaagagctgcgcggactcacctttcagcaactgacctggccggaggatctcaataaagatctccaacaggttgaaaagctgataagcggtgaaataaacacctatagtatggaaaaacgctactacaaccgcaatggcgatgttgtctgggcgttgcttgccgtcagtctggtgcgccacacggatggcacgccgctctattttatcgctcagattgaagacattaacgagctaaaacgcaccgaacaggtcaatcagcaactgatggagcgcatcactctggctaacgaagcgggcgggattggcatctgggagtgggagttgaagccgaatatttttagctgggataagcggatgttcgagctgtatgaaattcctccacatatcaaaccgaactggcaggtgtggtacgagtgcgtgctgccggaagatcgccagcatgccgaaaaagtgattcgtgatagcttgcaaagtcgcagcccctttaaactggaatttcgcattaccgtaaaagacggtattcgccatatccgcgccctcgccaaccgggtactgaataaagaaggcgaagtcgaacgtctcctcggcatcaatatggatatgaccgaagtgaaacagcttaacgaggcattgtttcaggaaaaagagcgcctgcacattacgcttgattccatcggtgaagccgtggtctgtattgatatggcgatgaaaattacctttatgaatccagtggcggagaagatgagcggctggacgcaggaagaagcgttaggtgttccgctcctgacggtgttgcatattacttttggcgacaacggaccattaatggagaacatttacagtgccgacaccagtcgttccgcgatcgagcaagatgtggtgttgcactgtcggagcggcggcagttacgacgtgcattacagtattacgccgttaagtactctggacggcagcaatattggtagcgttctggtgattcaggacgttaccgaaagtcgcaaaatgctgcgccagctgagctacagcgcctcccatgatgcactgacgcatctcgccaaccgcgccagttttgagaaacaactgcgtatcctgctgcaaacggtaaacagtacacatcagcgacatgccctggtgtttatcgatcttgatcgctttaaagcggtgaatgacagcgccgggcatgcggcgggtgacgctttgctgcgcgaactggcgagcttaatgctgagtatgctgcgttccagcgacgtgctggcgcgactcggtggggatgaatttggtctgctgctaccagactgtaatgttgaaagcgcgcgttttatcgctacacgcattatcagtgccgtgaatgactatcactttatatgggaaggccgtgtgcatcgggtaggtgccagtgccgggattaccttgattgatgacaacaatcatcaggcggcagaagtgatgagccaggctgatatcgcctgttatgcctccaaaaatggtggccggggccgggtgacggtttacgaaccgcagcaagctgccgcacatagcgaacgggcggcgatgagccttgatgaacagtggcggatgattaaagagaatcagttgatgatgctcgcccacggtgtcgctagcccacggatcccggaagcgcgtaatttgtggctgattagtcttaagctctggagttgcgaaggcgagattattgatgaacaaacatttcgtcgtagcttcagcgatccggcgcttagccatgctcttgaccgccgggtattccacgaatttttccagcaggccgcaaaagcggttgccagtaaaggcataagcatctccctccccctttccgttgccggtttgagtagcgccacgctggtgaatgatctgcttgagcagctggaaaatagccctctaccaccacggttattacatctgattattccggctgaagcgattttagatcacgcagaaagcgtgcaaaaactgcggctggcgggatgtcggatagtgctcagccaggtgggccgcgatctgcaaatcttcaacagcctgaaagcgaatatggcagattacctgctacttgatggtgagttatgcgccaacgtgcagggtaatttgatggatgagatgctgattacgattattcaggggcacgctcagcgactcgggatgaaaaccatcgccgggccagtcgttttacccttagtgatggatacgctttctggcatcggcgtcgatctgatttatggtgaggtgattgccgatgcccaaccgctggatttgctggtgaatagtagttatttcgcgattaactgaggcgtgcttccccatcgcctgatgcgacgctaacgcgtcttatcatgcctacaaatcgctcattccccaggccggataaggcgctcgcaccgcatccggcgaccaacgtcatgcttcgtctggttgccagccttccgtataccagatatgcaacagcgcataagaacgccagggcttccagcgctcggcataacggcggatttgcgccggtgtcattcccggaaatcgctgtttaatcagataatcatccggcaggaaaacatctttcgcctgccagccacgcaaagcaaaataattcgccgtccagcgcccgatacccggaaaagtttgcagcgttttcatcgcctgctccacatcgcccggtattgtcattggtaaggtgccctccagcgccgcatttgccagatgaatcagcgcctctgcccgtttcaacggcatacctaacgcttttaatgcctgcgggtctgctgctgccagccgctgaggcgtcgggaagcagatatactccggaaaatcatccagccgttcgccataaagctgtgccactctggcggtcaattttgccgccatcgccacgctcaccagttggcctaaaatcgcccgcacgccctgctcaaaagcatcaacacagccgggtaaacgcaatccgggccgcgccgcgcctaacctgcccaacgcaccgttaacaatttgtgggttacattgcagatcaaacaggcggctcattttcgccagacactctgcggcaacaggttctaaacctgcacttaaatttatgtgcagagtatggcgggctatatccggaatagcagtcaccacgccgcgatattcgcccaccgccagactacgggcataataactgtccgcgaccgtttccacactgctcaccgcacgggcggcgagaaatcccaacatccagctccagtcatacggcggctgccagttcagggtatacatcgcatctccttattcatccgctttcagcataaacgttattcagacgctgcgctttgctttcatattccggttgtcgcgacggcaacatttcgctaaagtcacgccccttcttcaccggcatggggattatttcgtgtttattggttttgattacggtacagcaaactgtagtgtggcggtcatgcgtgacggtaaaccgcatttgctaaaaatggaaaacgacagcacgctgctgcctagtatgctttgcgcgccaacgcgtgaagcggtaagcgaatggctgtaccgccatcatgatgttccggcagacgacgatgaaacgcaggcgctgttacgtcgggcgattcgttataaccgcgaagaagatatcgatgttacggcgaaaagcgtgcagttcggtctttccagtctggcacagtacattgatgatccagaagaagtgtggtttgtgaaaagtccaaaaagcttcctcggtgccagcggcttaaaaccgcagcaggtagcgctgtttgaggatctggtctgcgcaatgatgttgcacattcgccagcaggcgcaggcacagctgccagaagcgattactcaggcggtgattggtcgtccgatcaacttccaggggctgggcggtgatgaagcaaacacccaggcgcaagggattctggaacgcgcggcgaagcgtgccggattcagggacgtggtattccagtacgagccggtcgcggctgggctggattacgaagccaccttgcaggaagaaaaacgggtgctggtggtggatatcggcggtggtacgactgactgtagtttgctgctgatggggccgcagtggcgtagccgtctcgatcgtgaagccagcctgctgggtcacagtggttgccgtattggcggtaacgatctggatatcgcgctggcgtttaaaaacctgatgccactgctgggtatgggtggcgaaaccgaaaaaggcatcgccctgccgatcctgccgtggtggaatgcggttgccatcaacgacgtacctgcgcagagtgatttctacagtagtgccaacggtcgtctgcttaacgatctggtacgcgatgcccgcgaaccggaaaaagtggccctgttacagaaagtctggcgtcagcgtttaagctatcgcctggtgcgtagcgcagaagagtgcaaaattgctcttagtagcgtagcggaaacccgcgccagtctgccgtttatcagcaatgaactggctacgctgattagccagcgagggctggaaagcgccctcagccagccactgacgcggattctggaacaggtgcaactggccctggataacgcccaggaaaaaccggacgttatctacctgaccggcggtagcgcccgttctccgctgattaaaaaagcgctggcagaacagttgccgggcattccgattgcaggcggcgatgactttggctccgtcaccgccgggctggcacgctgggcggaagtggtgtttcgttaattgaaaaatggctcagcagcggcttaaatctgcctgcgcctgagccagtttttctgctgcctgacgtaacggttccatcaacggcatggtccgtgctggagcatgaaggcggaatcgctgcaactctgtcgcgccgactgtcaacgcgctttccagccgatgtcgtttggcggtcattttcgccattaccgcttgtctgtctgctggcgttatcgcttcattcggcctgaacacaaaacggcgttcacagctcgctttccagtcgataaccgcctgggtcagatggtcgccaaaccctttcacttgcttaacgccacgacgggtaacatctgcggctgtttcaataccaaaagaccgtaacgccgctttacgcgcagggccaacgccgggaatagaggcaacatcaataaaaaatccctccagaaacttctgcttctgccgttcccttgcagtgtcatgaagtgctgccagagcgcgtttctcttcttccggtaacccgagaatttcgtccttcattttttcgagcatcgtccgtttggcgataaaaccttccaggccgcctacctgctggatctggcggactaaatggtcatagtccattttcgcacgattaaatgcctcacggcgttgctgaacttctgctttgtacgctttgcttgtcagactgccaataatccagatagccgccagcacaggaaccaaaataatataacgcggttctgcctgaaggccgcaaagcagcaggcttaatgcactcagtgcgatctcaagcagaatgatgtattcgcgccgtaacaggcctaaaggaagcggcctgccagtcggttggaaatgatcgggtaatggcagttgcaatgctggcggtgctacactcgccatcaccatcgcccagactttcgccagcacaaaattcccgccggtggtaatgacctcttcgccgagatcaataaaatagataacaccttgattatccagcgcacaccacgggcagtcagtcaaatgagcggggtaaacatgcattgcactaacgatacatttctttaactgttggcgtagagagtccagtgccgctacccacgctttagccgtcggacgcccggttgccacgccactttccgtgaatgcctgctgaaacatggcttcaacatcactcggtaacatgcttagcggaatagatcgtggcggcggttttaaaccacgtcgctgattatcactcgcgtaggcataacggaaatgggtaatatccgtctccagcgcattacccgcatcagagataagcggcacaccagaataaggatgccgcccaccaaacaagacgtgaaaaattagcaacgcaaggccaaaattatcgtgattttctgtgcgttcaaaaccgacaaaacttggcaaggtttgtagctctggcggcgtaaaatggctcacgccgacttcgcataaatgcagtgtgccattggcgttaatttgaaaggagtcgctatcaatcagtaccactttgctgtcgcgacctaccataaaactgttctggtttacgtcacccacgacgtgcccgtgctcgtgaaccgtagcaaaagaactagcaatattgcgcgcaacatagagtagaaaatcccacgcacaatgagggtaactctggcgacgatgtgccgggctatagatcatatgaatcggttctttaccagaaacttttggcatcataaaaccgataacttttccgcctcgtccaccgtgaagcgttgcctgcggccaggcgacataattcaacaactgcgcgtcagctgtcgcagccataaaggcaagtttgtcctgttttaaggcgggtggcggcgtgtgataaatcttggcgacgctatcgacaaactcctcgatatcataaaccgcgccttcaccacctttgcccagttcacggccaagagtggtcaattcacctgtgcttgtaaatacttttatatttgttttcataatatttcgcgggtagttatattatatttcaatgaataataacaactaaccattaaaattatttctatatggggaaaacccactcaagaataaaaatgataatgcaattttatcaggatacaattcaatttcggcctgataatgattaacttccacaggtttttgctaactttgactacaaagggattctggagaaaaaatgaaaaagatattacttatgttgagtctgctattttttactaccgcgggctttagtgaagttagcgatacgttagtgacgggaggttatgataaacaagcgatgtctgacgcgattaaacatgcgcggaaagaaaccgataaattcatcgaggttatgaataaaaaagatgccgatactttcgcagtcaaagccccgataaccgatcacggaagaaccgagcatttctggcttacggatgtcacttattctaacggcatgtttattggcgtaatcagcaatgaccctggtattgttacaaacgtagaatatggccaggagtggaaaatcaagaaagaagatattagtgactggatgtatacgcgcggggataaaatttacggcggttataccattgatcctttattggtcacctatccaaaagaagaagccgacgagctaagagcaaaattagttcgctaatcagccgttatatttattgtttaaactggcggttgaattgttgtcttcaaccgccatgagaaactcactctgcccacagcgccagtgccaacgttttatcatcatccgtacgctcgtttaccgccgggctggacaaaaactgctttaacaattcaggtaataaatcgagttgttcctgcgttgctgccgccagtccattgaaaaacggggtaaagaaaggcacatgaggagaattatccagcatatttaacgccagtcgctggataccatccgtaaatgctgcaactttgtgcgcacgcccagtgctggtgagagtttccagtctggaaacggcatcttcgtcggtaatgaagtgcgtcatgttggcatattcacccgccatcggcgtgagaggcaattgcagaccgtgacccaaatctaccaccacgccgccatcgccaatctgcataatcaaggtgccgtcagggctactaatcagtcccagaaatgtgcaggcaaaatcgcgaaccgctaattctttggcttccgcctcggcaaaaagtcgttgacgaatggtcagtaccatatttgtggcgaggacatcattaagccccaattccccgccctgcactttttggctcatataagccatcgcttcattgacggcgagcatcgcgccttcgccaccctggctgacactgcctgcgccatcagcgacaaatacgctcaataatggctgctggtcatttaaccaggcaatctgcatctggcaggcatcctgacaaggcaagtccgcgctgatgtggctcgttccaacggtacttgcatagaccagacgccagctcacacactcgtccagccttttggcgcttccagcacaacttccgttcccggcgtggagcgggaaacgctacgcaggctactggataaccagctaaacagttcacggaattgtaatccttgcagaggcaaaggctgacgaacgctaatttgtgccagcgtcttcatatccgccccctgaacaccgatggaaaagaaagcaaaccttttatcttcttccccccgaaacactttgttggctgcagcctgccactcatcggttggtgcaccatcggtaatcaggaaaatccacgggcgataatagctaataccatttgcacgatactcacgtttccgctcctctaccatatccagggctttggtaatggccgcacccattggtgtatcgccctgggcaaacaggatgggcggaaaaaaattagcggcgctggtaaagggttgttccacatgcaccgggccgaacgtcacaatgccgagttccactctttttaaagccagcggatcagcaagcagttcatcacgaaaggtaaccaatccggcgttaagttcattaataggtctaccgttcatagaaccagaaacatccagcagcaaaatgcaggggcaacgtggttccgggttactggcaaaatcgctggtggcaaacgtgatttgttcgctcataagaaatcctttcttagagaattatcgaggtccggtatcataccgactgcaataatgaaataagagcaaacgaagaaactttcagaattaggcccggcggcgcagaaaattttgctattcgcctcgcaagaacggagagccgtcgattgacactaagggcggagtgacataatttcaggagtgagggttagggagaggtttccccctccccctggtgttcttagtaagcctggaagctaatcactaagagtatcaccagtatgatgacgtgcttcatcataaccctttccttattaaaagccctcttctccgggagaggctttcccgtttcagcgtcccgctgaaatcatcggcttacctcctttcgccctgaatgcagtctatcgctaacgcgtgaataaaatagtttcctctgtgattattgcgtaacgactcgcaaagaatatttgctggcaggatcgcagactacaaagcctgcggattgacaatcttatcgtgaagacatactttcaggagtgagggtagagcggggtttcccccgccctggtagtcttagtaagcggggaagcttatgactaagagcaccacgatgatgagtagcttcatcatgaccctttccttatttatggccccttcctcgggaggggctttcccgtttcagcgtcccgctgaaatcgtcggcttacctcctttcgccatgcaagcagtctatcgctaacgcgtagataaaatagtttcctgtgttattactggatgcgtgctcgcaaatgtgcccgtcattcagacgattccagacagtgtttcataattcctccatttttctcccttattggctggctacactagtatcattccgcgaaacgtttcaggaagagaaactcttaacgatgaaaggtagttataaatcccgttgggtaatcgtaatcgtggtggttatcgccgccatcgccgcattctggttctggcaaggccgcaatgactcccggagtgcagccccaggggcgacgaaacaagcgcagcaaagcccagcgggtggtcgacgtggtatgcgttccggcccattagccccggttcaggcggcgaccgccgtagaacaggcagttccgcgttacctcaccgggcttggcaccattaccgccgctaataccgttacggtgcgcagccgcgtggacggccaactgatagcgttacatttccaggaaggccagcaggtcaaagcaggcgatttactggcagaaattgaccccagccagttcaaagttgcattagcacaagcccagggccaactggcaaaagataaagccacgcttgccaacgcccgccgtgacctggcgcgttatcaacaactggcaaaaaccaatctcgtttcccgccaggagctggatgcccaacaggcgctggtcagtgaaaccgaaggcaccattaaggctgatgaagcaagcgttgccagcgcgcagctgcaactcgactggagccggattaccgcaccagtcgatggtcgcgttggtctcaagcaggttgatgttggtaaccaaatctccagtggtgataccaccgggatcgtggtgatcacccagacgcatcctatcgatttagtctttaccctgccggaaagcgatatcgctaccgtagtgcaggcgcagaaagccggaaaaccgctggtggtagaagcctgggatcgcaccaacagcaagaaattaagtgaaggcacgctgttaagtctagataaccaaatcgatgccactaccggtacgattaaagtgaaagcacgctttaataatcaggatgatgcgctgtttcccaatcagtttgttaacgcgcgcatgttagtcgacaccgaacaaaacgccgtagtgatcccaacagccgccctgcaaatgggcaatgaaggccattttgtctgggtgctgaatagcgaaaacaaggtcagcaaacatctggtgacgccgggcattcaggacagtcagaaagtggtgatccgtgcaggtatttctgcgggcgatcgcgtggtgacagacggcattgatcgcctgaccgaaggggcgaaagtggaagtggtggaagcccagagcgccactactccggaagagaaagccaccagccgcgaatacgcgaaaaaaggagcacgctcctgatgcaggtgttacccccgagcagcacaggcggcccgagccgcctgtttattatgcgtcctgtggccaccacgctgctgatggtggcgatcttactcgccgggattatcggttatcgcgccctgcccgttagcgcgctgccggaagtggactatccgaccattcaggtggtcacgctctacccaggtgccagcccggatgtcatgacctctgccgttaccgcgccgctagaacgccagttcgggcagatgtctggcctgaaacagatgagcagccaaagttccggcggtgcgagtgttatcactttgcagttccagctaacattaccgctcgatgtcgccgagcaggaagtgcaggccgcgattaacgctgcgaccaacttgttgccgagcgatctgcctaacccgccggtttacagcaaagtgaacccggcagatccgccgatcatgacgctcgccgtcaccagtaccgccatgccgatgacgcaagtggaagatatggtggaaacccgcgtcgcgcagaaaatcagccagatttccggcgtcggcctggtgacgctttccggcggtcagcgtccggctgttcgcgtcaaacttaacgctcaggcgattgccgccctcggcctgaccagcgaaaccgtgcgcaccgccattaccggcgctaacgttaacagcgcaaaaggtagcctcgacggcccttcccgtgcggtcacgctttccgcgaacgaccagatgcaatccgccgaagagtatcgccagctaatcatcgcctaccagaacggcgcgccaattcgtctgggcgatgtcgcaactgtagagcaaggtgcagaaaacagctggctcggcgcgtgggcgaacaaagaacaggccattgtgatgaatgttcagcgccagcccggtgctaacattatctccaccgccgacagcattcggcagatgctgccacagctcactgagagtctgccgaaaagcgtgaaggtgacagtgctttccgatcgcaccaccaatatccgcgcatccgtcgatgatactcagtttgaattgatgatggctatcgcgctggtagtcatgattatctacctgtttttgcgcaatattccggcgaccatcattcccggtgttgctgtaccgctgagcttaatcggcactttcgcggttatggtgtttctcgattttagtatcaataacctgacactgatggcgttaactatcgccaccggattcgtggtcgatgacgccatcgtggtgatcgaaaacatttcccgctatatcgaaaaaggcgaaaaaccgttggcggcggcgctcaagggcgcaggtgaaatcggctttaccattatcagcctgaccttcagtctgattgcggtgttgatcccactgctgtttatgggcgatatcgtcgggcgactgttccgcgaatttgctattaccctggcggtagcgattttgatcagtgcggtggtgagcctgaccctgacaccgatgatgtgcgcgcggatgctcagccaggagagcttgcgtaaacagaaccgcttctcccgtgccagcgaaaaaatgttcgacaggataatcgccgcctatggtcgtggactggcgaaagtgctgaatcatccgtggctgaccttaagcgtggcactcagcacgctgctgcttagcgtgctgctgtgggtgttcattccgaaaggtttcttcccggtacaggacaatggcattattcagggcactttgcaggcaccgcaatccagctcctttgccaatatggcccagcgacaacgccaggtcgcggacgtgattttgcaggatccggcagtgcaaagcctgaccagttttgttggcgttgatggcactaacccgagcctgaacagtgcacgtttacaaatcaacctcaaaccgttggatgaacgtgatgatcgggtgcaaaaagtcatcgcccgtctgcaaacggcggtagataaagtgccgggcgtcgatctcttcctgcaaccaacgcaggatctgactattgatactcaggtcagccgcacccagtaccagtttaccttgcaggccacgagtctggatgcgctcagtacctgggtgccacagttgatggaaaaactccagcaactgccacagctttctgatgtctccagcgactggcaggacaaagggctggtggcgtatgtcaatgttgatcgcgacagcgccagccgtctggggatcagcatggcggatgtcgataacgccctgtacaacgcgtttggtcagcggctgatttccactatttatactcaggccaaccagtatcgcgtggtgctggagcacaacaccgaaaataccccaggcctcgcggcgctggataccattcgcctgaccagcagcgacggcggcgtggtgccgctaagcagtattgccaaaattgagcagcgttttgcgccgctctccatcaaccatctggatcagttcccggtaacgaccatctcctttaacgtgccggataactatagcctgggcgatgcggtgcaggcgattatggacaccgaaaagacgctgaatctgccggtggatatcaccacgcagttccagggcagcaccctcgccttccagagcgcgctgggcagcactgtctggctgattgtcgcggcggtggtggcgatgtatatcgtgctcggcattctgtacgagagctttattcacccgatcaccattctcagcacgctacccaccgcaggggttggcgcactgctggcgttgctgattgctggtagcgaactggatgtgattgcgattatcggcattattttgctgatcggtatcgtgaagaagaacgccatcatgatgatcgacttcgcgctggctgctgagcgcgagcaaggcatgagcccgcgcgaggcaatctaccaggcttgtctgttgcgttttcgtccgatcctgatgaccactctggcggctctgcttggcgcgctgccgctgatgttgagtaccggggtcggcgcggaactgcgtcgtccgttaggtatcggcatggtcggcggtctgattgtcagccaggtgctgacgctgtttaccacgccggtgatttatttgctgttcgaccgcctggcattgtggaccaaaagccgctttgcccgtcatgaagaggaggcgtaagtgaagttttttgccctcttcatttaccgcccggtggcgacgattttactgagcgttgccattaccctgtgcggcatactgggcttccgtatgctgccggtcgccccgctgccgcaggtcgattttccggtgattatcgtcagcgccagcctgcccggtgcgagtccagaaacaatggcgtcttccgttgccacgccgctggagcgcagtcttgggcgcattgccggagtcagtgaaatgacctccagcagtagcctcggcagcacgcgtattattttgcagtttgattttgaccgggatatcaacggcgcagcgcgtgatgtgcaggcggcgatcaacgctgcacaaagtttgctgcccagtgggatgcccagccgcccgacctatcgcaaagcgaacccgagcgatgcgccaattatgatcctcacgctgacgtccgatacttatagccagggtgaactgtacgatttcgccagcacgcagctggctccgacgattagccaaatcgacggtgttggtgatgtcgatgtcggaggcagcagtctgcccgccgtacgcgtcgggctgaatccgcaggcgctgtttaatcagggcgtgagcctggacgacgtacgcaccgccgtcagcaatgccaacgtgcgtaaaccgcagggcgcgctggaagatggcactcaccgctggcagatccagaccaatgatgagctaaaaaccgccgctgaatatcagccgttgattattcactacaacaacggcggcgcggttcgtctgggcgatgtggcgacggtgaccgacagtgtgcaggatgtgcgcaacgccgggatgaccaacgccaaaccggctattttactgatgatccgcaaactgccggaagccaatattatccagacggttgacagcatccgggcaaaattaccggagttgcaggaaaccattccggcggcgattgatctgcaaattgcccaggatcgctcccccaccattcgcgccagcctggaagaagtcgagcaaacgctgattatcagcgtggcgctggtgattctggtggtgtttttattcctgcgcagcggtcgcgccactattattcccgccgttagcgtgccggttagcctgattggtacgtttgcggcgatgtacctgtgcggattcagtctcaataaccttagcttaatggcgctcaccatcgctactggtttcgtggtggatgacgccatcgtggtgctggaaaacattgcacgtcatctggaagcgggaatgaaaccgttgcaagccgcactgcaaggtactcgcgaagtcggttttacggtgctgagcatgagtctgagtctggtggcggtgttcctgccgctgctgttgatgggcggattgccgggccgactgttacgcgaatttgccgtgacgctttctgtcgccattggtataagcttgctggtttctctgacattaacgccaatgatgtgtggctggatgctgaaagccagcaagccgcgcgagcaaaagcgactgcgtggttttggtcgcatgttggtagccctgcaacaaggctacggcaagagtctaaaatgggtgctcaatcatacccgtctggtgggcgtggtgctgcttggcaccattgcgctgaatatctggctgtatatcagcatcccgaaaaccttcttcccggagcaggacactggcgtgttgatgggcgggattcaggcggatcagagtattagctttcaggcgatgcgcggtaagttgcaggatttcatgaaaattatccgtgacgatccggcagtggataatgtcaccggctttacaggcggtagccgagtgaacagcgggatgatgtttatcaccctcaagccacgcgacgaacgcagcgaaacggcgcagcaaattatcgaccgtctgcgcgtaaaactggcgaaagaaccgggggcgaatctgttcctgatggcggtacaggatattcgcgttggtgggcgtcagagcaacgccagctaccagtacacgttgttatccgacgacctggcggcactgcgagaatgggagccgaaaatccgcaaaaaactggcgacgttgccggaactggcggacgtgaactccgatcagcaggataacggcgcggagatgaatctggtttacgaccgcgacaccatggcacggctgggaatcgacgtacaagccgccaacagtctgttaaataacgccttcggtcagcggcaaatcagcaccatttaccagccgatgaaccagtataaagtggtgatggaagtggatccgcgctatacccaggacatcagtgcgctggaaaaaatgttcgttatcaataacgaaggcaaagcgatcccgctgagctatttcgctaaatggcaaccggcgaatgccccactaagcgtgaatcatcagggattaagcgcggccagcaccattagctttaacctgccgaccggaaaaagcctcagcgacgccagtgcggcgatcgatcgcgcaatgacccagcttggtgtgcctagcacggtgcgcggcagttttgccggcacggcgcaggtgttccaggagacgatgaacagccaggtgatcctgattatcgccgccatcgccacggtgtatatcgtgctgggtatcctttacgagagttacgtacatccgctgacgattctctccaccctgcccagcgcgggcgttggagcgctgttggcgctggagctgttcaatgccccgttcagcctaatcgccctgatagggatcatgctattaatcggcatcgtgaagaaaaacgccattatgatggtcgattttgcgcttgaagcccaacggcacggtaacctgacgccgcaggaagctattttccaggcctgtctgctgcgttttcgcccgattatgatgactaccctggcggcgctgtttggtgcgctgccgctggtattgagcggcggcgacggcagcgagctgcggcaacccctggggatcaccattgtcggcggactggtaatgagccagctccttacgctgtataccacgccggtggtgtatctctttttcgaccgtctgcggctgcgttttagccgtaaacctaaacaaacggtaaccgagtaaatgacagatcttcccgacagcacccgttggcaattgtggattgtggctttcggcttctttatgcagagcctggacaccaccatcgtaaacaccgcccttcccagtatggcgcaaagcctcggggaaagtccgttgcatatgcacatggtcattgtctcttatgtgctgaccgtggcggtgatgctgcccgccagcggctggctggcggacaaagtcggcgtgcgcaatattttctttaccgccatcgtgctgtttactctcggtagtctgttttgcgcgctttccggcacgctgaacgaactgttgctggcacgcgcgttacagggcgttggcggcgcgatgatggtgccggtcggcagattgacggtgatgaaaatcgtaccgcgcgagcaatatatggcggcgatgacctttgtcacgttacccggtcaggtcggtccgctgctcggtccggcgctcggcggtctgctggtggagtacgcaagctggcactggatctttttgatcaacattccggtggggattatcggtgcgatcgccacattgctgttaatgccgaactacaccatgcagacgcggcgctttgatctctccggatttttattgctggcggttggcatggcggtattaaccctggcgctggacggcagtaaaggtacaggtttaagcccgctgacgattgcaggcctggtcgcagttggcgtggtggcactggtgctttatctgctgcacgccagaaataacaaccgtgccctgttcagtctgaaactgttccgtactcgtacctttagcctgggcctggcggggagctttgccggacgtattggcagtggcatgttgccctttatgacaccggttttcctgcaaattggcctcggtttcagcccgtttcatgccggactgatgatgatcccgatggtgcttggcagcatgggaatgaagcgaattgtggtacaggtggtgaatcgctttggttatcgtcgggtactggtagcgaccacgctgggtctgagcctggtcaccctgttgtttatgactaccgccctgctgggctggtactacgttttgccgttcgtcctgtttttacaagggatggtcaacagcacgcgtttctcctccatgaacaccctgacgctgaaagatctcccggacaatctggcgagcagcggcaacagcctgctgagcatgattatgcaattgagcatgagtatcggcgtcactatcgccgggctgttgctgggactttttggtagtcagcatgtcagcgtcgacagcggcaccacacaaaccgtctttatgtacacctggcttagcatggcgttgatcatcgcccttccggcgttcatctttgccagagtgccgaacgatacgcatcaaaatgtagctattagccggcgaaaaaggagcgcgcaatgaagttctggcgacccggtattaccggcaaactgtttctggcgattttcgccacctgcattgtcttgctgatcagtatgcactgggcggtgcgtatcagttttgagcgtggctttattgattacatcaagcatggtaatgaacagcgattacaactgttaagtgatgcgcttggcgagcagtatgcgcagcatggcaactggcgcttcctgcgcaacaatgatcgctttgtctttcagatcctgcgtagttttgaacacgataatagcgaagataaacccggcccgggtatgccaccgcacggctggcgtacccagttctgggtggttgatcaaaacaacaaagtgctggttggtccgcgagcgccgattccacctgacggtacacggcgacccattctggtcaacggtgcggaagttggcgcggtgatcgcctcccccgttgagcggttaacgcgcaatactgatatcaatttcgataaacaacagcggcaaaccagctggttgattgtcgccctggcaacgttactcgcggcacttgccacttttctgctggcgcgcggtttactggcaccggtaaaacgacttgtcgatggcacgcacaaactggcggcgggcgatttcactacccgcgtaacgcccaccagtgaagatgaactgggcaaactggcgcaagacttcaaccagcttgccagcacactggagaaaaaccagcaaatgcggcgcgattttatggccgatatttctcacgaactgcgtacgccattagcggtgctgcgcggtgaactggaagccattcaggatggcgtgcgtaaattcacgccggagacggtggcgtctttacaggcggaggtcggtacactgaccaaactggttgacgatctccatcagttgagcatgtctgatgaaggcgctctcgcctatcaaaaagcaccggtagatttgatcccactgctggaagtggcgggcggcgcatttcgcgaacgattcgccagtcgtggcctgaaactgcaattttccctgccagacagtattaccgtatttggcgatcgcgaccgtttaatgcagttattcaataacttactggaaaacagcctgcgctacactgacagcggcggcagcctgcaaatctctgccgggcagcgcgacaaaacggtgcgcctgacctttgccgacagtgcgccaggtgtcagtgacgatcagctacaaaaattgtttgaacgtttttatcgcaccgaaggttcccgcaaccgtgccagcggcggttccgggctggggctggcgatttgcctgaacattgttgaagcacataatggtcgcattattgctgcccatagcccttttggcggggtaagcattacagtagagttaccgctggaacgggatttacagagagaagtatgaccgagttaccaatcgacgaaaacacaccgcgtattttgatcgtggaagatgaaccgaagctggggcagttgctcattgattatctgcgtgctgcgagctatgcgccgacgcttatcagccacggcgatcaggtactgccgtatgtgcgccagacaccaccggatctgatcctgttagatctgatgctccctggcaccgatggcctgacgctgtgccgggaaattcgtcgtttttctgacattccgatcgtgatggtgacggcaaaaatcgaagagatcgatcgcctgctggggctggagattggcgcagatgattatatctgtaagccgtacagcccacgggaagtggtagcgcgcgtcaaaaccattttgcgccgttgcaaaccgcagcgcgagttgcagcaacaggatgctgaaagcccgttgattatcgacgaaggtcgttttcaggctagttggcgcggtaaaatgcttgacctgacgcctgcggaatttcgtctgctgaaaacgctctctcacgaaccaggaaaagtgttctcccgcgagcaattgctcaatcatctttatgacgactaccgcgtagtaaccgaccgcaccatcgacagccacattaaaaacctgcgccgcaagctggaatctctcgacgccgaacagagttttatccgcgccgtttatggcgtcggttaccgctgggaagccgacgcctgccgcatcgtttaattttagcgacattattttgttagccggagatggcgttcagaccagatccggcaacattatcccacgcatggtcagcaaactgacattatctctccgccctggcaggcatcagaaaatcgctcatactttaatcggtaaacagcacctttagaatcctgtcgtttgttttcgatttcaaaatataatgaaattatttgtttttaaatatcgagataacgatcacaaaaacgacaatatgaaaattattcgaggagtgaaaggcaaaaaaacggcctcccgatagggaagccgtagcaaagtgcgcgtgtttttatgccggatgcggtgtaaacatacgtggcagtgctatgtaggcatgataagacgcttcagcgtcgcatcaggcataggttgccggatgcagcgtaaacgccttatccgtcctacggggtggtgttgttcgtataaggcgtatcaggcgatagtaattttgctatcgagataaacgtcctgcacggcgttaatcagtttcacgccgtcagccatgcttttcttgaacgctttacgtccaagaatcagccccattccgcctgcgcgtttgttgataaccgcagtacgcactgcatcgctgaggtcagtttcaccgcccgcagcaccgccggagtttatcaacccagcccgacccatatagcagttagctaactgataacgcaccagatcaatcgggttttcgctggtcaatttgctgtaaacacgatcgtcggtgtaaccgtaattaattgctttatagccgccgttattttccgccattttttgtttgacgatatctgcaccgatggttgccgccagatggtttgcctgaccggtcaggtcggcggaaacatggtaatcaacgccatctttcttaaaggcggagttacgcaaataggcccacagcactgtcaccatacccagctcgtgcgcacgttcaaaagccgcagaaatttcttcaatctggcgacgactctcttcgctgccaaaatagatagtcgcaccaaccgcaaccgcgcccatgttgaacgcctgctccacgctggcatacagcgtttgatcgtaggtattcgggtaacttagcgtctcgttgtgattaagtttgacgaggaatggaatgcgatgcgcataacgccggcttacgctcgccagcacgccgtaagtactcgccacacagttacagcccgcttcgatcgccagttcaacaatgtttttcgggtcaaagtagagcgggttagcagcaaaactagctccggcagagtgctcaacgccctggtcaaccggcagaatagaaagatatcctgtgccagccagacgcccggtgttgtacaacgtctgcatattacgtaacaccgctggcgggcgattattgtcaatcattacgcggtctacgtagtcatgtccggggagataaagctggtcagaaggaattgtcatacaacggtgctgtaaaaggttgtcggcgtctttgccaagcaactgcgcaatatctgtcattactatgctcccgtaaattccgattggatatcggctatggattgtcctggcccgccttttgcgggcaatcataatcctggtcgttacgggcgagtttttccatcttttggatgttttttcagcgttttctgttggctcgattcatcagaaaaaatgttagcgcggtcaagttttcaccgcaaaggtatttaaaaggtattattaagtggtattgtcatcgcgtaccttacattacctgtcatgaaggaattaaaagatgaaaacaacagcaaagctgagcttcatgatgtttgttgaatggtttatctggggcgcgtggtttgtgccattgtggttgtggttaagtaaaagcggttttagtgccggagaaattggctggagctatgcctgtaccgccattgcggcgatcctgagcccaattctggttggctccatcactgaccgctttttcagcgcgcaaaaagtgctggcggtattgatgttcgcaggcgcgctgctgatgtatttcgctgcgcaacagaccacttttgccgggttcttcccgttactgctggcctacagcctaacctatatgccgaccattgcgctgactaacagcatcgcttttgccaacgtgccggatgttgagcgtgatttcccgcgcattcgtgtgatgggcactatcggctggattgcctccggtctggcatgtggtttcttgccgcaaatactggggtatgccgatatcagtccgactaacatcccgctgctgattaccgccggaagttctgctctgctcggtgtgtttgcgtttttcctgcccgacacgccaccaaaaagcaccggcaaaatggatattaaagtcatgctcggcctggatgcgctgatcctgctgcgcgataaaaacttcctcgtctttttcttctgtagtttcctgtttgcgatgccactagcgttctattacatctttgccaacggttatctgaccgaagttggcatgaaaaacgccaccggctggatgacgctcggccagttctctgaaatcttctttatgctggcattgccgtttttcactaaacgctttggtatcaaaaaggtattattgcttggtctggtcaccgctgcgatccgctatggcttctttatttacggtagtgcggatgaatatttcacctacgcgttactgttcctcggtattttgcttcacggcgtaagttacgatttttactacgttaccgcttacatctatgtcgataaaaaagcccccgtgcatatgcgtaccgctgcgcaggggctgatcacgctctgctgccagggcttcggcagtttgctcggctatcgtcttggcggtgtgatgatggaaaagatgttcgcttatcaggaaccggtaaacggactgactttcaactggtccgggatgtggactttcggcgcggtgatgattgccattatcgccgtgctgttcatgatttttttccgcgaatccgacaacgaaattacggctatcaaggtcgatgatcgcgatattgcgttgacacaaggggaagttaaatgaaaacagaacgtattctcggtgctctttatgggcaggcgttaggggatgcgatggggatgccctccgagctttggccacgcagccgcgttaaagcacactttggctggattgaccgttttcttcctggaccaaaggagaataacgcggcctgttattttaaccgcgccgaattcaccgacgataccagcatggcgctgtgtctggcggatgcgttactggaacgtgaaggcaagatcgatccggatctgattgggcgtaatattctcgactgggcgctgcgtttcgacgcctttaacaaaaacgtactaggtccgaccagcaagattgcgcttaacgccattcgcgacggtaaacccgttgctgaactggaaaacaacggcgtgaccaacggcgcagcgatgcgcgtcagcccattaggttgtttgcttccggcgcgtgatgttgattcctttattgatgatgtagcgctggcgtccagcccgacccataaatccgatctggcggttgcaggcgcggtagtcatcgcatgggcgatttctcgtgccattgacggagaaagctggagtgcgattgttgattccctgcctagtattgcgcgacatgcacagcaaaaacgcatcactacgttcagcgccagtctggcggcgcggctggagattgcgctgaaaattgtgcgcaatgccgacggcaccgaatccgccagcgaacagctttaccaggtcgttggcgcaggtaccagcactattgagtccgttccgtgcgccattgcgctggttgaactggcacaaaccgacccgaatcgctgcgccgtcctgtgcgctaaccttggcggcgacacagacaccatcggtgctatggcgacggcaatttgcggcgcgttgcatggcgttaacgctatcgatcctgcgttaaaggcggaactggatgcggtaaatcagcttgatttcaaccgctatgccacagcgctggcgaaatatcgtcaacaacgggaggcggtatgagcggcgctcgattacacacgctgctgcctgaattaaccacgcgtcagagcgtgatggtcgtcggcgcggcggtcattgacgtgatcgccgacgcttatgccctcccctggcgtgggtgcgatatcgaactgaaacagcagagcgttaacgttggcggctgcgcactgaatattgccgtggcgttaaagcgcctcggcatcgaagcgggtaatgccttgccgctcggtcagggcgtgtgggcggagatgattcgcaaccggatggcaaaagagggcttaatcagcctgatcgataacgccgaaggtgataacggctggtgtctggcgctggttgagccggatggcgaacgcacttttatgagtttcagcggtgttgaaaatcagtggaatcgccagtggctggcgcgattaaccgttgcgcctggcagcctgctctatttttccggttatcaactggccagcccctgcggcgaattgttagtggaatggctggaagagctgcaagacgtgacgccgtttatcgattttggcccacgtattggcgatatcccggatgcattactggcgcggatcatggcctgtcgacctttagtgagcctcaatcgtcaagaggctgagattgccgccgaacgttttgctttatccgcagagataacaacacttggcaagcaatggcaggagaaatttgccgcgccgttgatcgttcgtctcgataaagaaggcgcatggtatttcagcaacgacgcttctggctgcattccggcatttccaacgcaagttgtcgacaccattggggcgggcgacagtcatgccggtggcgtacttgccgggctggcctctggtctgccactggcggatgccgtattactgggcaatgcagtggcgagctgggttgtcgggcatcggggcggtgattgtgcgccaacgcgcgaggaactactcctcgcacacaaaaacgtataattactcctcgcacacaaaaacgtatagatcgctgcgacagtggctaatgctgtactcaataggccgttgctgttggtcaagcgccacttgcttgatcaccagcaccggtattttgctatctaactgaatatgactctgaaactcggcatccggcatccgggcgctaacgcgggaacgcgtacgttgtgggtaaatgtgctggctgcggaaatagtcataaagactaatcccgatggcatcaacatcatgaattaaatgcgccggaacccagctttcctcaatgcttaccgcttcttcatcgacatagcgaatacgcttaagcaaaaagacatcacttcctgcttcgaccgccagctgctgcgcgacttcttcgggacatttcacgacacgcttgttaacccatagcgtatcgggctttttcccgcgcaataccacctgctgagaaaaacctcgcgcttctttcaagctgtattcgaagatgttgttgatctgcgtgccgtaaccgcggctacgcgtcaccacaccctcttcttccagcgcctgcatcgccttgcgcaccgtaatgcggctaacgccggttaactgacttaaatcacgttcaccgggcaaaatattgccatgctccagcaccccgctgcgcacggcattttttaccgtttcggcaaacttaatataaagcggcgtgttatccgccgctaaaatacgctcgttcagttgggcaatcagctgggtatgcgcttgttccatttgtctttttcctgccggggagtctggtgggagtatatcactgcttcttatttaaggcgtttctttaatcccatcaacgaatgcctgcaactcctccaccgtgccattaaatacattaaaatccaccggaccattgatgccatctacctgtccacggtcggaatgctgccagaagcgccaggccattccgtcattgtccggacgacgttgatagtagtgagccacccaccacggatattcattgaaatagcccgccagattggtgtgataaaaaacggctccactgtaaataatcggctttttccccgtacttttttcgaccatttttagccactgacttacccgcttgcgtaattcttttgcgcttaattttccccgttcttctacgtccagcacggcagggaaatcgccttgactgaaatccaccgtttgcagaaataatctcgcctgaacactagcggatacgctcggggagaaataatgatacgccccacgcagcaggccattttcgcggcttagttgccagttacggctaaaataggggtccaccagcttttcgccttccgtcgccttaataaaagcaaactgtaagcggataccattgtcgcgcatttttgccacccgctgccagtcgatccgctcctgccagcggctaacatctattccgtgaatggtgtaactggcaggaatgcgaatagcgaaagatttaaccgggcgataaccgtagaagtggatgtagtctgtaatctgaactgctgtgctatagaaaaaattcaccgtctgacgcggataaattgcaacgatggaaattagcccaagagcgcataatagagaggtgagtttttttcgactggtaattcttagctgcattggtttcatccctgaatgtcagtgccaaaggctgacaataaccaaagcagctatagtacggtgctcaccaccaggcgtggaagtggtgaaccggaccaataccgtgaccaacttccagcgtgtcggcctgggctaacgcgctactaagccagctttttgcctcctgtacggtgtcagcccagtttgtatggcgcgggcgtagtgcagccaacgccgcagagagtgtacaaccagtgccgtgggtgtttttggtcataatgcgcggtgcggtaaaccgttgttcaccctcgcgggtaaacagccagtccgggctttgctcatcatccagatgaccacctttcattagcactgcgccacagcccatcgccaacaggcttcgcccttgttccagcatttcctgttcggtgcgcgcgtgtggcgcgtcgagcaaggcggcagcttcgggcaagtttggcgttattaaactaacctgtggcaataatcgactgcgcagcgtagcaaccgcgctaggactaagcagcgggtcgccgctttttgccagcataacggtgtcgagtaccacgttttggatctgataacgttgcaaccgttctgccaccgcttcaacaatatcggtttccgccagcataccgattttagtggtatcgattcgcacatcgctgaacacgctatcgagctgggcggcgacaaaatcaggctcaatgcgatacacgctctgtacgccacgggtattttgcgccaccagtgcagtaataacactgcaaccataagcgccaagtgcgctgaaggttttaagatcggcctgaatccccgcaccaccactcggatcagtaccggcaatcgtcagagcgttaattcgtttcatgcctgcacctcctgcgtcaattgccagagcgcatcaaggaaatgtggaacaaaactgcctggcccctcgcttctggcgactgcgcgttctccggcttgtttcatccagtgacaggcagatgcgacattttccagcgtatcgcctggtaacgcacagcaggcagcgacaaccgcgcttaatgcacagccagttcctaccactttggtcattaacggatcaccaccgtgaataccaatgatacgatgtccatcggtaacataatccatctcgccagtgaccacgacgattgcgccagtttcccgtgccagtgtttgtgcagcgggtatcgcgttagctgcggcgtcagtggtatccactccccgtccgccattagcaatgccagctaatgccatgatttcgctagcattaccacgtatcgctgccggtttaaaagataaaagttcatgacaaaaatggcggcgataatcgagcgcacccaccgctactggatcaagcgtccagggtgtttgagagctttttgcttgctcaacggcagcacgcatcgcctgagcgcgtggctgcgtcagtgtgccaacgttaatcaacaaggcactggcgatagccgcaaactgactggcctcttcggtttcgataaccatcgctgggcttgcaccgagcgccagcaaggtattggcggtaaaggtttgcaccacatcattggtcatgcagtgcacaagaggggaatgttggtgaaaaaggtgtaacgcgtgcgcagattgcgcactacccagcaggtcgacttgcatagtttgctcctgccataacgtgaagaagcaatgacctggtggtccgtgacttccctacgctggcattatccagatcaggtgatacgggtatttctcagccttcacgcagaagggcaccccgagtcgtttggttgcgatgataaatcgcagaggaggatggtaatgtccagcgcacgcgttgtaaacgaggaaaaacggcagttttacaatcgcgttaataaattatttgatataactatccagcaccttcagaacgacatccagatcttcttcacgttttagctcatccccctggtgaacgatgtgttccgtcagatgacctttaatcacttcccgcatcagaccgtttaccgcgccacggatagcagcaatctgttgtaaaactgcagcgcattcgtgcggctcgtcgagcattttcttgagcgccacgacctggccctgaatcttactggcacgcgctttcagtttctgtttatcacggattgtatgagacatggcaacacctggttaacaagaatatgaaaaatcatagcactattaatctactggggggtagtatcaggtactgggggggagtagaatcagattgccgaattaatactaagaattattatcatgaccgaatttacaactcttcttcagcaaggaaacgcctggttcttcatccccagcgccatcttacttggtgcgcttcatggcctggaaccagggcacagtaaaacgatgatggcggcgtttatcatcgccatcaaaggcaccattaaacaagcggtgatgctcggactggcagcaactattagccataccgcagtggtctggttaattgcctttggcgggatggtgatcagcaagcgctttactgctcaaagtgcagaaccgtggctccagctgatttccgcagtgatcattattagcaccgcgttctggatgttctggcgtacctggcgcggcgaacgcaactggctggagaatatgcacgggcatgattatgagcatcatcatcacgatcacgaacatcaccacgaccatggacatcatcaccatcacgaacatggcgagtatcaggatgcccatgcacgagcccatgccaatgacattaaacgacgctttgatggtagagaggtcaccaactggcaaattttgttatttggcttaaccggtggccttatcccctgcccggcagcaattaccgtgctgttgatatgcattcagttgaaagccctgacactgggcgcaacactggtcgtcagtttcagcattggcctggcgttaacgcttgtcaccgtaggcgttggcgcagcaatcagcgttcagcaggtcgcaaaacgctggagcggatttaacactctcgctaaacgcgccccctatttttccagtctgttgattggcttagtcggtgtgtatatgggcgtacatggcttcatgggcataatgcgataactcaatcctttaggcttgcatgttatcttcagcccaggatgattcttaaatcagctatttccgctgactctctgctcgctaaggatgcttttagggcatcctttcatttacactttttacgaaatcatgggatcactaacaaaatatcgcttgtcagttatattgtatggcaggaaagatatgcgactgatattacagatccccaaagtggagagtttatgaccattaaaaataagatgttgctgggtgcgcttttgctggttaccagtgccgcctgggccgcaccagccaccgcgggtagcaccaataccagcggaatttctaagtatgagttaagtagtttcattgctgactttaagcatttcaaaccaggggacaccgtaccagaaatgtaccgtaccgatgagtacaacattaagcagtggcagttgcgtaacctgcccgcgcctgatgccgggacgcactggacctatatgggtggcgcgtacgtgttgatcagcgacaccgacggtaaaatcattaaagcctacgacggtgagattttttatcatcgctaaaaaaagccccctcatcatgagggggaaatgcagacaccttgttattttttattattagccacttgctcgtcttgcttgttattagtcgtatttcacgttgattaatgcggttgcctccagtgcgccagatttaactttgtttgtatcgtagacgtagtaactggctgttatcggaatactaaccgttgtatctgtaagtttactcttcgccgcaacttcctttaaatttgtatatcctttactgctgttagtgatatttaaaagtgtgactgggctaccattactttcaagaataaatcctacgccattatcttccgcacctttcagtattgtgttgctgttggttaacaagtcagaactacttaaatacacctgcattttccgacttgtttgattttgttgacctaataaatttttacaacgcagaataatatccccttgtttactatttattgttgctttgttacctgtggctggtaattgactaacgggaatactgtctaaagtaattaataaatcgtccggtttgcaggttgtggttatcgggttgtaactcaatgtcagattaaaggaatagacacctgcattttgtgccaatgcatttctgtagctatttacacatgcatcccaactcttgccacctaataaacacagtagaaattgtactgcggcactcccgcgtgtgctactactagcactggataatgtcgcaacaccattaatcatcacactaccgccgccccccgcagaaacattcacttttgcattactggccgcaggtgtcaccgtaacactataaccactggtgaaactggtctgattattactcaacgtgatgttgtttttattggtccattcaaaatgtaaatttaattttatggtatcgttataaagtccaacaataatatcgctcgggctcataggggtgatagtatttgtacttacgcaactgctatcattaaaattatgctcatatgtcgccatttgtgtttgagtaagtgcaaaatccccctgaacaaccaagttgtgctgaacagataactcactataacatgccgcatagctcacaggcataaccatcatcattaatataaatagcattatgcgaatttccatagaaccacctgactattactggcaaatataatttctactttcatcaatctctttaccgaaggtgattgtgcaactaagtccttgttgcttatcaattgccacattaacgcttggcggtacttcattggtgcgaataaataactgacttccctggccgacaacgccaatattatgaccatggatatcattgacttcataaccaaacgttaaactttgcccatctgctcttaacgcttttataaaccatggcttgcgctgatcggtatcaaaattaaccagtacaaccgcgccgcgataaggggcggcaattttccggttgccacgtaattctgcttcgctatcgctttggctcacatccagcatcaggtgattttcccgataaggtgtcattccgtcgtatatcaccactccattacggtttgttgtgcgatatttttgcccattgacataagcatctttaattcctggcgcattcatcacagcaaacgtttcggaaagacggttcgccagattaacgccaccgctccaggcgacaatgcccccactaacactggctccagcctgtcgataagtactgctctgactataactgccattcactgtcgcaaccggcgcgttccaggtcaaattcgccccagctgtcgtttcatttccctgatgttgatgactcaggttgacaccataattgaactgatcccgactccctactgttccacttaatcccgtattattactggcaaacccctgatcatcaaacgtcgtactgttagacatatatatttgccgacgaggcgtgctaacgtcatcaccccaatcaaagggaatgcttataaaaatattaaaacgtttctcttcatgatgattctcgtcataagcctggcttgccgcgagggtatagcttatccgtcgcaggttgttggaataactcaactgataatccttactactgccgctacgcccccagtaatctcgccataacgtacttaaactcacagacccccaaccttctggcaaactctggctcatattggcggaaaagctatttttgcggccaaaatcgttctggtaataatcggcaatgtcatagacatcgttttcatcacggcgataattatctttattgtttgcccaaacgtgatcgttaaatgtccggtaatcacggctgctataacgccaggccgccagaccaaaacgcgtgctcgtttggctcacaaatttgttgtaggcaatttgataactttgcccgtcaaacacatcgccgttgtcttgtttactatggctcttagtggcatcgacggaaatggcaccaatgcgtgtattccagccagcccccaaagtaaacgcgtaataattattcgcgaccatgctgccaccatacagcgtcaataaattattaaaaccatactgataacccgcctggacaaaatcactttgtttgctcgccccttcaatatggctacgacccgccgctaaatcatatttgctcacgccgggttgcagcatatttggcaccgctgcataaggcaccagataggtggttacgctgccgtccgcctctttcacgctgacatcaagatctgctccaccaccggccaactgcaaatctgtaatcgcgaacgggccaggaggaacctctttctgataaaccacaaaaccattctgttcaatagttaccagcgcgttactctgagcaatcccctgcacccgtggcgtaaaattttgtttgctgttaggcaacatctgcatatcacgaaacaaccgcacacctctgaagcgaacagaatcaaaaatatcgctacttgtgtacatatcacccacgcgaagcgtgccgagaagttgggcaaatccacgttccagatacagggtattgcttttccacacccctggattgttatttgttttactgaaactggcatcagaatgcagttgccaccccagtaaatttaacccgctgttaaaacgtacatatgtactcttgttattaccgctcgctttatagtcgctgtaatactgactcagataataagaggtataaaacgcattaataccccgctcccagttttccggtggaacatagccactttccagttcttccacccaggcctgcgggacactgaaatcgagacgaaaaaccccgatatcccaggtatagctcccaccctgaacaagttgctcaaatgttaaacattgcttaccgctggcgaagttatcgctattaatgcctaaccgcttgataacttctctacttaaacatgtttcttgcgggttgtctttaacaataatctcatatttcccgcgccattgcttattgacataaatatcgatgtcatactgccccggtaagggttgattatcatcaagacgaatatttgcaacctgctggtctttcattccacctatcataaaatgggtatcaaaggtttcttcagctgcataagcttcaatgccgagcaataacgctacgattgcacttgcaagtggggtcattctcaacataggcagctcctgcaattaaattttgtcactaatatagttgccatggtcatcgataatggtcagatgccagttatttgcattattacttttgacattaacactctgactttctaagggggcaatcataatagtttcataattgactttgacattattagctttgacatcgctaatcgtcacccaattagcactgtcattttttatcaccaaaccattgccactgcgatttaccagcaattttttaaatgtcgctttatttaccggagcaatacccgctggccggtaaaacaacttaattctgttttgcatcgcaaacttcagtgcattcttaccttcttgctctggactatttggtggaatatccagaacattcagataaaaaatgctttctttattagtgggcagtttattcggcataattttgatttttacttgctgcccggaatttgcccctatttttgccactggtggcgttaacatgaaaggaacctgaattttttctggtggtaaactcgtatcgccatcatcaatccacgcctgcagcaggctagaacggtttccctggttcatcaactgcaccatcacttctttattttctgccgggtaaataatgcgcgtcccgtagataacaattccggcatgtgcaggaaggaccatagaaaaaatgagtaaagataataatcctttcattttaatgcctcttaaattaaaaggccgccatgggatagcggccatgtttattacctggagaaacttacaattttatttattaatcctgcgccacacgcataaccagagaagataacacatcaccactttgcacactgttatctgtcagtttcaggtattttgctttaaacggaatagcatattgaccttccgctgttttataactctcaatgttaaaaggtgcagaaacatccaggacatcgctgttatcacctaaatagagatagtaacccacggtatcgttgctactggctatcgccttatcgttaccggttattttatcgttggtaatcaagctgagttttacaccagcaacttctttcgggcagctaatttttaacatgctgctggttacaccgactgcatcatcataggtagaatatttagctttaccttcaaagacactggttggtacagtcggcatattaatacttacactatcaccacccgcttcgaatttacacggagattctgcaatattccccttaatagttaatgttccggtatcaacgtctgcagcaaatactccagcgctcataaaaaaagaagaaaagacagcggcagcaataatactacgtttcataatatgttccttaataaaatttatttttggttgttaagagtctgtatctcttggaaacaaatttctcacatcaaaaaagttgccgcaatgtaaacacattgttttattgatttaaaacaaattaaccattgcaatataaatacaaaaaatatttaagagtattaactatttatcgcatctatcaattaatgtagatttatgtaaatggtattgttgatatcaataaaaaagccgaaatcatttatataaatgatttcggctttctaaatgcaattaaaatcaggttgccaaattaatcgtagcgatttaacacgattcgacgtttgctatcgctacctgcaacaaccacttctgtcgttacacctttgacggggctagaaaacagatgacgggtgtcaacattatacgttaactgaccacaatgctgttgaggttgaccattaaccatagccatactgcatgttgggggactgatcctgccattaatcgctaatgtggcagtctcactagagaatgcgggagaagccaatccataggcaagaaaaataattccactcagccaatacttattcattgaacgttatccctgtagtaaaggttatgcctggatagaatgagtgcataacaaactatagctgtacatccactacacagccacgaaggatgataatgaagcattgcctgtatgatcaatcgactttgtagagtttcggacgaaggtccgcagaatattcgcagtattaaataagtgttcattaatgcggcaaaaactaatacaccgcatcaatgtaacatctctgcggtgtatgaagaataaccagaatggttaataggcgttagaccgcgcggaaggaaatctcgcctggaatgacttcaccctgccagtagagctgagctgcaacgcggtcagccagctggcggtagatagcggtaaattcgctctccggacggctgataaccgttggcgtacctttatcgagatcctcacgtaaggagatgtgtaacggcatctgccccagcagctgtgtatggtatttttcagccagtttctctgcaccaccggtaccgaaaatcggttcatggtgaccacagttactgcaaatatgcacactcatgttctcgacaataccgagcaccggaacctcgactttctcgaacatcacaatgccttttttcgcatcgatcagcgcgatgtcctgcggggtggtgaccacgactgcaccggttactggaatgttttgcgccagcgtcaattgaatgtcaccggtgcctggcggcatatcaagcaccagatagtcgagatccggccacaaggtttcctgcaacatctgcattaacgccttgctcgccatcggtccacgccacaccatcgcattgtcgtcagtgaccagataaccaatactattggttgccaggccatgagacataatcggtgccatatgggtaccgtccgggctagttggacgctgattttctgcgcccaacattgttgggatacttgggccgtagatatcggcgtccagaatgccgactttcgccccttctgccgccagcgccagtgccaggtttaccgccgtggagcttttacccacgccgcctttaccggaactcaccgcgataatgttcttcacaccgttaattcccggctgattcttcacgcgtttcagagtggctatgttatggctcagtttccagtcgatagctttcgccccggtgatgcgcagcagttcggcgctacattgctcttttaactcttcgaacgcgctatgccagacaaacggcataaccagttccacatgcaacgtgtcgtccatccaggcgacatggtgcaacgctttcagcgtggtgaggttatgcttcagggttgggtgctgaaaattggccagtgtcccggcgaccattgcgcgcaaggcttctggacttttggcctgggattgttcgttcatcccgactccttttttgtatagataaaccatcagctgatagtttacctgaagaatatagagaagtacttacttaacattttcccatttggtactatctaaccccttttcactattaagaagtaatgcctactatgactcaagtcgcgaagaaaattctggtgacgtgcgcactgccgtacgctaacggcagtatccacctcggccatatgctggagcacatccaggctgatgtctgggtccgttaccagcgaatgcgcggccacgaggtcaacttcatctgcgccgacgatgcccacggtacaccgatcatgctgaaagctcagcagcttggtatcaccccggagcagatgattggcgaaatgagtcaggagcatcagactgatttcgcaggctttaacatcagctatgacaactatcacagcacgcacagcgaagagaaccgccagttgagtgaacttatctactctcgcctgaaagaaaacggttttattaaaaaccgcaccatctctcagctgtacgatccggaaaaaggcatgttcctgccggaccgttttgtgaaaggcacctgcccgaaatgtaaatccccggatcaatacggcgataactgcgaagtctgcggcgcgacctacagcccgactgaactgatcgagccgaaaagcgtggtttctggcgctacgccggtaatgcgtgattctgaacacttcttctttgatctgccctctttcagcgaaatgttgcaggcatggacccgcagcggtgcgttgcaggagcaggtggcaaataaaatgcaggagtggtttgaatctggcctgcaacagtgggatatctcccgcgacgccccttacttcggttttgaaattccgaacgcgccgggcaaatatttctacgtctggctggacgcaccgattggctacatgggttctttcaagaatctgtgcgacaagcgcggcgacagcgtaagcttcgatgaatactggaagaaagactccaccgccgagctgtaccacttcatcggtaaagatattgtttacttccacagcctgttctggcctgccatgctggaaggcagcaacttccgcaagccgtccaacctgtttgttcatggctatgtgacggtgaacggcgcaaagatgtccaagtctcgcggcacctttattaaagccagcacctggctgaatcattttgacgcagacagcctgcgttactactacactgcgaaactctctagccgcattgatgatatcgatctcaacctggaagatttcgttcagcgtgtgaatgccgatatcgttaacaaagtggttaacctggcctcccgtaatgcgggctttatcaacaagcgttttgacggcgtgctggcaagcgaactggctgacccgcagttgtacaaaaccttcactgatgccgctgaagtgattggtgaagcgtgggaaagccgtgaatttggtaaagccgtgcgcgaaatcatggcgctggctgatctggctaaccgctatgtcgatgaacaggctccgtgggtggtggcgaaacaggaaggccgcgatgccgacctgcaggcaatttgcagtatgggcatcaacctgttccgcgtgctgatgacttacctgaagccggtactgccgaaactgaccgagcgtgcagaagcattcctcaatacggaactgacctgggatggtatccagcaaccgctgctgggccacaaagtgaatccgttcaaggcgctgtataaccgcatcgatatgaggcaggttgaagcactggtggaagcctctaaagaagaagtaaaagccgctgccgcgccggtaactggcccgctggcagatgatccgattcaggaaaccatcacctttgacgacttcgctaaagttgacctgcgcgtggcgctgattgaaaacgcagagtttgttgaaggttctgacaaactgctgcgcctgacgctggatctcggcggtgaaaaacgcaatgtcttctccggtattcgttctgcttacccggatccgcaggcactgattggtcgtcacaccattatggtggctaacctggcaccacgtaaaatgcgcttcggtatctctgaaggcatggtgatggctgccggtcctggcgggaaagatattttcctgctaagcccggatgccggtgctaaaccgggtcatcaggtgaaataatcccccttcaaggcgctgcatcgacagcgccttttctttataaattcctaaagttgttttcttgcgattttgtctctctctaacccgcataaatactggtagcatctgcattcaactggataaaattacagggatgcagaatgagacactttatctatcaggacgaaaaatcacataaattcagggcagttgagcaacagggaaacgagttgcatatcagttggggaaaagttggcaccaaagggcaaagccagataaaaagtttttcagatgctgcggcagcggcaaaagcggagcttaagctgattgcggagaaggtgaagaaggggtatgtggagcaagcgaaggataattctttgcaaccttcccaaacggtaacgggctctctcaaggtagcggacttatccaccattattcaggaacaaccctctttcgtagcagaaacccgtgcgcctgacaaaaatacagatgctgttttaccgtggctggcgaaagatattgctgtcgtttttccgcccgaagttgtacacaccacgttaagtcatcgccgctttcccggagttcctgttcagcaagcagacaaattgccccaattacgtcgcttagcctgtagtgtgtcgcaacgggataataaaacagccacatttgacttcagcgcctgttctttagaatggcaaaacaccgtcgcccaggcgatcagtcagatcgacggcctgaaaacaacacagttaccatcaccagtaatggctgtactcacggcacttgaaatgaaatgcacaagatataaagtgcgtgaggatgttatggatcagatcgtccaggaaggcggtctggaatatgctactgatgtaataatacaccttcaacagattgatattgaatgggattatgcgaataatgtcattattattctgccgtctggcattgcacctagctacttggagcaatattccagatttgaatgacgcctacgtaaacatttatcactgacggaagagtctctctggcaaaaatgtgcacaaaaacttattgccgcaattccacatattccagaatggcggcaaccattaattgctttgttattacccgaaaaaccagaaattgcacatgaaattgcccagcgtctactggggcaaaaaaaattaccctcgcttgagtggttaaaaatagtggcgactgatgagcacattcttgcctcattagaaaaatatcacgaaccatatgccatttttgatgattactattgtggtgcgatatggtcagccaccgtattacaggagcaaggtgttgcagccctgccccgatttgctccctatgccgcaagtgactactgcgccgatgtgttgcgtcatatcaatcatccgttcgcattgacactgcttatacgtgtagccgggcaaactaaacgctgtcacgatcggatgacgaaagccattgctgcgttcccacatgcagcaatggcggcactgacggaacttcttgggcaaaaagaagagaacagttggcgcattatgctaatgacaatgcttatctcacaaccagcactggcagaacaggtcattccctggctctcgacacccgcagttgccgtactgaaatcatgccagcaacaactgacacagccctcaaaccatgccagcgccgatctactgccagccgtagtagtctcccctccctggctttcgaaaaagaaaaaatcgccgattccggtgctggatttagcgccattaggcattgagccaatctgttatctgacagaagaaatcagtaatcaacttttggcgaaatatatctggtattcaaaacacatcacggttagccatgaagaaagtactaccaacctgttggcaaggatgggttttcaacgacggatcgctggtacatatattaaagctcccgaagcggtagttgaggcatggctaaatgaagattattcaaccttactaagtgaatttaaggtgtttcattcacctaccgggcattattggcagttggggattttgacaacattgccgctggagaaagcagtaaaagcatggaatgcccttaccctatctccacataccgataccgaatactccatgttacattttggactcaaagggttacctgggttagtaaactcacttgcacgctatccacaagaagccttgcccatcacgaattacttcgcagcgagtgagctggctcctgccgtcgcccgtgccttcaacaaactgaaaacgctacgcgaaaacgcccgtagctggctgttgaaatacccggaacatgcccttaccggcctgctgcctgcggcgctcggcaaagccggtgaagcacaggataacgcccgcgctgccttgcgtatgcttaccgaaaacggtcatcagccattactgcaagaaatcgcccgacgttataaccagccggaagtaaccgatgcggtgaacgctctgcttgcgctcgatcccttagataatcacccgacaaaaatccccactcttccggccttttatcagccatcgctctggacgcgcccggtattaaaagcaaatgcccaatcactgccagatagcgccctcctccacctcggtgaaatgctccgcttccctcaggaagaggctctgtatccgggattattgcaggtgaaagacgtctgttccgccgactcactggcgggatttgcctgggatctgtttaccgcctggcagaccgctggcgcgccgtcgaaagagagttgggcgttcactgcgttaggcgttctcggtaacgatgacaccgcccgcaaactgacgccattaatacgcgcctggcctggtgaatcccagcataaacgcgccaccgttgggttggatattctcgctgctatcggtagtgatatcgcccttatgcagcttaacggcatcgcccagaaactgaaattcaaagcattacaggagcgggcaaaagaaaaaattgccgacattgccgagagccgcgaactcacggtggcggagcttgaagatcgggttagcaccggatctcggtctggatgataacggttcgctgctgctggattttggcccacggcagttcaccgtcagctttgatgaaaccttaaaaccgtttgtgcgtgatgtttccggcagccgcctgaaagacctgcccaaaccgaacaaaagcgatgatgaaacgcgggcgaacgatgcggttaaccgctacaaattgctgaaaaaagatgcgcgtaccatcgccgcccagcaggtagcaaggctggaatccgccatgtgcctgcgccgccgctggtcgctggaaaacttccagctcttcctggttgagcatccgctggttcgtcacttaacccgccgtctgatttggggcgtttatagcgccgaaaaccagctactggcttgctttcgcgtagcagaagataacagctccagcaccgctgacgatgatcttttcaccctgccggaaggcgatatctctatcggcactcctcacgttctggaaatatcaccaacggatgctgccgcctttggtcagctttttgccgactacgaactgctaccaccgttccgccagctcgaccgtaacagctacgccctgacagaagccgagcgcaatgccagtgaactgacccgctgggcaggcagaaaatgcccgagtggtcgggtcatggggctggcgaataaaggctggataaagggcgaaccacaggatggaggctggatcggatggatgatcaaacctttgggtcgctggtcgttaatcatggaaatcgatgaaggctttgcggtaggcatgtcgccagccgaactcagcgctgagcagctcttaagcaagctgtggctatgggaaggcaaagcagaaagatatggctgggggagtaattcaacacaggaagcgcagttctccgtaatcgatgccatcaccgccagcgagctaattaacgatattgaagccctgtttgaataaggaaagagcatggacaaggaattaccgtggctggcggataacgcccaactggaactgaaatataaaaaaggcaaaacgccgctcagtcatcgtcgctggccgggcgaaccagtgtccgttatcactggaagtctcatccagacattgggtgatgaattgctacaaaaagctgagaagaaaaaaaacattgtctggcgttatgagaattttagtctggagtggcagtccgccatcacgcaggccatcaacttgatcggcgaacacaaacccagtatcccggcccggacaatggcggcgctagcctgtatcgcgcaaaatgacagccaacagttgctcgacgaaatcgtccaacaagaggggctggaatatgcgactgaggtggtgattgcacgccagtttattgcgcggtgttatgagagtgatcctctggtagtgacattgcagtatcaggacgaggattatggctatggttatcgcagtgaaacctataacgaattcgatctccgactgcgtaagcatctctctctggcagaggaaagctgctggcagcgttgcgccgacaaactcattgccgcactaccaggaataaacaaagttcgccgcccttttattgcgctgatcctcccggaaaaaccagaaatagccaatgagttggtaggccttgaatgcccgcgaactcattttcattctaaggagtggttaaaagttgttgctaatgaccccacagcggtgagaaaactcgaacactactggagccaggatatatttagcgatcgagaagccagctacatgagccatgaaaaccacttcggctacgcggcctgcgccgcccttttgcgcgaacaaggactggcagccattccgcgcctcgcgatgtatgcccataaagaagattgcggcagtctgctggtacaaattaaccatccgcaagtcatccgcaccttgctactggtggctgataaaaacaaacccagcctgcaacgtgtagctaaataccataaaaacttcccccatgcgacgctcgccgcactggcagaactgctggcgttaacagaaccaccagcccgccctggttatccaatcatcgaagacaaaaagctgcctgcacagcaaaaagcacgcgatgaatactggcgtacgctgttacaaacgctgatggcaagccagccacaactggcagcagaagtgatgccgtggttaagtactcaaccccagagtgtgctgaagagttatttaagcgcaccgcccaaaccggttattgatggcaccgataacagcaatctgccagaaatcctcgttagtccaccgtggcgtagtaagaaaaaaatgacagctccacgtcttgatttggcaccgctcgaattaactccgcaagtttactggcaaccaggcgaacaagagaggcttgccgccactgagcctgcccgttatttcagcacggaatctcttgcgcaacgcatggaacaaaaaagtggacgagttgtattacaggaactgggttttggggatgatgtatggctgtttctgaattatatactccccggaaaactggatgctgcacgcaatagtctctttgttcagtggcattactaccaggggcgggttgaagagatcctgaatggctggaactccccggaagcacaattagcagaacaggcgctccgcagcggtcacatagaagcgttaattaacatatgggaaaatgacaactacagtcattatcgtccggaaaagagtgtctggaacctgtatttattggcacagttgccgcgtgagatggctttgaccttctggctgcgtatcaatgagaaaaagcatctgttcgcgggtgaggactattttctcagtatcctcggattggatgcgctaccaggtctgctgttggcttttagtcatcgtccaaaagaaacatttccgttaattttaaattttggcgcaacagaactggcgctgcctgttgcccacgtctggcgacgtttcgcggcgcagcgtgatctggctcgccagtggattttacaatggccggaacatacggctagtgcacttatccctcttgtctttaccaaacccagcgataatagcgaagccgcattacttgccctgcgtttactgtacgaacagggacatggcgaattgctacaaaccgtggcaaaccgctggcagcgtacagatgtatggtctgccctggagcagttgcttaaacagggtccaatggacatttacccggcacgcattccaaaagcccctgatttctggcatccgcaaatgtggtccaggccgcgccttatcactaataatcaaactgttaccaatgacgctctggaaattatcggcgaaatgctgcgctttacccaggggggacgtttttatagcgggctggaacaactgaaaacgttctgccagccacaaacgctggcagcttttgcctgggatctcttcactgcgtggcaacaagctggtgcccccgcaaaagacaactgggcatttctggcgttaagtctctttggtgacgaaagcacggcacgggatctgacgacacagatcctcgcctggccacaagaaggcaaatctgcccgtgctgtcagcggcctgaacatccttaccctgatgaataatgatatggcgctgatacagctgcatcatataagccaacgggctaaatcccgccccttacgtgataacgcggcggaatttcttcaggtggtcgcagaaaatcgcgggctaagccaggaagagctagcggacagattagtcccaaccctgggccttgatgatccgcaggcgttgagttttgattttggtccccggcagtttaccgttcgcttcgatgaaaatctcaacccggttatctttgatcagcaaaacgttcgccagaaaagcgttccccgtttgcgcgccgatgacgatcaactgaaagcgcccgaggcactggcccgactaaaagggctaaaaaaagatgctactcaggtgagcaaaaacctgctcccgcgtcttgaaacggccctacgtaccacccgacgctggagcctggcagattttcattctctgtttgttaatcatccctttacccgtctggttacccagcgattaatatggggggtttatccggcaaatgaaccgcgttgtttactcaaagcctttcgtgtggccgcagagggggagttctgcaatgcgcaagatgagccaattgacctgcctgcggacgctctgattggcattgcccacccgttagaaatgacagcagaaatgcgcagtgaatttgcacagctttttgccgattacgaaattatgccgccttttcgccagttgagccgccgcacggtgctgctcacacctgacgagagtaccagtaacagcctgactcgctgggaaggtaaatccgctaccgttgggcaacttatgggaatgcgatacaaaggctgggagagtggctatgaggacgcatttgtctataacctgggtgagtaccggctggtccttaagtttagtcccggttttaaccactacaatgttgatagcaaagcgctaatgagcttccgttctcttcgagtgtaccgtgacaataaatccgtcacttttgccgaacttgatgtgtttgatttgagtgaggcgttaagcgcacctgacgtcattttccattaaaacacagcgggcagtgatgcaactgcccgttatcaacacgacttaccagcggggaaagcgatgatcgtgcaaaaagagctggttgctatttacgattatgaggtccctgtacctgaagatccgttttccttcagacttgagatccataaatgctctgaattatttacaggttccgtctatcgactggagcgattccggctacgtccaacatttcatcaacgtgatcgagaagatgctgacccgctaataaatgatgcgttgatttatataagagatgagtgtattgatgagcggaaattacgaggtgaaagtcctgaaactgtaatagcaatttttaatcgtgaactacagaatatattcaaccaagaaatagaataatatactctaaataattcaaattggtccgatccggcgcaacgtcccaatggcctggattataaatctcattatcttaattgcaacggggtccagccgtggttataattcgttcgttggaacacgatgttgcacaggctgtggtgttaggcctgaaaatagtaaataaaagaacctgcctcaccagcaggtttttttatttactgtgatctgctttccagatatttttcgctcaaacaactaatgcgccaaacatttattgcgcgtaaaatatcgtttatttcattaatacatttcagggatgaatatatgagtccgcagaataatcatctgcagcgtccgcctgctgctgtgttatacgccgatgaactggcaaaattaaaacaaaatgataacgcaccttgcccgcccggttggcagttaagtttgcctgcggcccgtgcttttatccttggcgacgaagcgcaaaatatcagccgtaaagtggtgattagcccctccgctgtcgaacgtatgttagtcactcttgctaccggccgcggtttgatgttggtgggggaaccgggtaccgcaaaatctcttctttctgaattactggcaaccgctattagcggcgatgccgggttaaccatccagggcggggcatctaccaccgaagatcaaatcaagtatggctggaactacgccctgcttatcaatcatggtccgagtacggaagcgctggtccctgccccgctttatcagggaatgcgcgacggcaaaatcgtccgtttcgaagagataacgcgtacaccgctggaagtgcaggactgtctgttaggtatgctttctgacagggtgatgacggggccggaactcactggtgaagccagtcagctctatgcgcgagaaggctttaatattattgccactgccaatacccgcgatcgcggcgtcaatgaaatgagtgctgcgctaaagcgtcgcttcgattttgaaacggtttttccgattatggatttcgcccaggagttggaactggtcgccagtgctagcgcgcgtttgctggcccatagcggtattccgcataaagtgcctgacgcggtactggaattactggtccgcaccttccgcgatctgcgtgccaacggcgaaaagaaaacgagtatggatacactgacagcgattatgtccaccgctgaagccgtgaacgtggcccatgctgtgggcgtccgcgcctggtttttagcgaatcgcgcgggggagcctgccgacctggtggaatgtattgccggaaccatcgtcaaagataacgaagaagatcgcgcgcgtctgcgccgttacttcgaacagcgtgtcgccacacataaagaagctcactggcaggcttattatcaagcccgccaccgcctgccgtgaggaaagatgcatgagcgagccgttaattgtcggcatccggcatcatagtccggcctgcgcccggctggtgaaaagcttaatcgaaagccagcggccacgatacgtgttgattgaaggcccggctgattttaatgaccgggtagacgaactgtttttagcccaccagcttccggtagctatttacagttattgccagtatcaggacggtgcagcccccgggcgtggtgcctggacgccatttgctgaatttagcccggagtggcaggcgctacaagccgcacgtcgcattcaggcacaaacttacttcatcgatttgccttgctgggcgcagagtgaagaagaggacgatagccctgatacgcaagatgaaagccaggccttactgctgcgtgccacccgcatggataacagcgataccctgtgggatcacttgttcgaagatgaaagccagcaaactgcattaccctctgcgctggcgcactattttgcccaactgcggggcgacgcctccggcgatgcgctcaatcgtcagcgcgaagcctttatggcccgctggattggatgggcgatgcagcaaaataatggcgacgtgttagttgtctgcggtggctggcacgctccggcactggcaaagatgtggcgcgaatgccctcagaaaattaacaagccagaattgcccagcctggcagatgccgttacaggttgttatctcacaccctacagtgaaaagcgccttgatgtgctggcaggataccttagtggaatgcctgccccggtatggcaaaactggtgctggcagtggggcttgcagaaggccggtgaacaactgctaaaaactatccttacccgtttgcgccagcacaaattgcccgcttctaccgcggatatggctgccgctcatctgcatgcgatggcgctggcacagttgcgcggtcatacactaccgttacgcactgactggctggatgccatagcaggcagcctgattaaagaagccctgaacgcgccgttgccgtggagctatcgcggcgttattcatcccgataccgatccgattctgctaacgttgatagacacattagcgggtgacggattcggtaaacttgccccttctacgccacaaccgcctctgccaaaagatgtcacctgcgaactggaacgtaccgcaatctcccttccggcggagcttaccttaaatcgctttacccccgatgggctggcgcaaagtcaggtgttacatcggctggcaatactggagatccctgggattgtacgccagcagggaagtacactgacacttgcaggcaacggtgaagaacgctggaaattaacccgcccgcttagccagcatgcggcattgattgaggccgcctgttttggtgccacactccaggaagccgcacgcaataaattagaagccgatatgctggacgcgggcggaatcggcagtatcaccacatgtcttagccaggcggcgttagcgggtctggcgtccttcagtcaacaattactggagcaactcacactattaatcgcccaggaaaatcaatttgccgaaatgggccaggcgctggaagtgctttatgccttatggcggctggatgaaattagcggtatgcaaggcgcgcagatattacaaacgacgttatgcgcgactatcgatcgcacgctgtggctgtgtgaatctaacggcagaccggatgaaaaggagtttcacgctcacctgcatagctggcaagcgctttgccatattctgcgcgatctacatagcggcgttaatttacccggcgtttctctttctgcggcggtagccttactggagcgacgcagtcaggcaattcatgccccggcgctggatcgcggcgcggctcttggcgcactaatgcgtctggaacatcccaacgccagtgccgaagcggcgctgacgatgctggcgcagttatccccggcacaatctggtgaggcgctgcacggtttgctggcgctggcccgccatcaactggcctgtcagccggcatttatcgccggtttcagcagtcatttaaatcaactgagtgaagccgattttattaacgccctgcccgatttacgcgcggcgatggcctggctaccaccacgagaacgcgggacgctggcgcatcaggtgcttgagcattatcaactggcgcaacttcccgttagcgcgctgcaaatgccgttgcattgtccaccacaggccattgcacatcatcaacaactcgaacagcaggcactggcaagcctgcaaaactggggagttttccatgtctgaactgaacgatcttctgaccacccgtgagctacaacgctggcgattaattcttggcgaagcggcagaaacgacgctttgtgggctggatgacaacgcccggcagatagaccacgcgctggagtggctgtatgggcgcgatcctgaacggctccagcgtggtgaacgttccggtggattaggtggcagtaatctcaccacccctgagtggatcaacagtattcacacgctgtttccgcagcaggtgattgagcggctggaaagcgatgccgtgctgcgctacggcattgaagatgtggtgacgaatctcgacgtgctggaacgtatgcagccttctgaaagcctgctacgcgctgttttgcacaccaaacatctgatgaaccccgaagtactggctgccgcccgccggatagtgtgccaggttgttgaagaaattatggctcgactggcaaaggaagttcgtcaggctttttctggtgtccgcgatcgccgtcgccgtagttttattccactggcgcgaaactttgatttcaaaagtactctgcgcgccaacctgcaacactggcacccgcaacacggcaagttgtatatcgaatccccccgctttaacagccgcattaaacgccaaagcgaacaatggcaactggtcttactggttgatcaaagcggaagcatggtcgatagcgtgatccactctgcggtgatggcggcctgtttgtggcagttacccggcattcgtacccatctggtggcgtttgacacaagcgtcgttgatctcacggcagacgttgccgatccggtagagttattaatgaaagtacagttgggcggcgggaccaatatcgccagtgccgtggagtatggtcggcaacttattgaacaaccagcgaaaagcgtcattatcctcgtgagcgatttttacgaagggggtagtagtagtttactgacgcatcaggtgaaaaagtgtgtccagagcggcatcaaagtgctgggactggcagcgctcgatagcaccgcaacaccttgctatgaccgcgatacggcccaggcgctggttaatgtcggcgcacaaatagccgccatgacgccgggcgagctggcaagttggcttgcggagaatcttcagagttgacataacttgcggagaatcttcagtcatgaatagtctacgtccggaattattagaactgacaccgcaggccctgacggcgttaagcaatgccggttttgttaagcgcagtcttaaggaactggaaaatggcaacgtcccggagatcagccatgagaacgacgctttaatcgccaccttcagtgacggtgtccgtacccagctggcgaacggccaggcactgaaagaggctcagtgcagttgcggggccaacggtatgtgccgtcatcgcgtgatgctggtgttaagttatcaacgactttgtgccaccactcagtctacggaaaaagaagaagagtgggatccggcaatctggctggaagaactggctacccttcccgatgctacccgcaaacgcgcacaggcgctggtcgctaaaggcatcaccattgagttgttctgtgcgccgggtgaaattccctctgcccgcttaccgatgagcgatgtgcgtttttattcccgcagcagtattcgtttcgcccgttgtgattgtattgaaggcacactttgcgaacatgtcgtactggcggtacaggccttcgtcgaggccaaagcgcagcaagcagaatttaaccatttaatctggcagatgcgcagcgaacacgtcacaagttctgacgatccgtttgccagcgaagaaggcaacgcgtgtcgtcaatatgttcagcaattaagccagacattatggcttggcggcatcagccagccgctcatccattacgaggcagcattcaaccgcgcattgcaggcggcagagacctgcaactggcgctgggtgagtgaaagcctacggcaactgcgcgccagcgttgatgccttccacgcccgcgccagccactataatgccggagaatgcttacatcagcttgcggcattaaacagtcgattaaattgcgcacaagagatggcccggcgcgacagtattggtgaagttcctcctgtgccgtggcgcacggtcgttggctctggcattgccggagaagcaaagcttgatcatctgcggctggtgtctttaggtatgcgttgctggcaggatattgagcattatggtttacgcatctggtttaccgatcccgacaccggcagtattttgcaccttagccgcagttggccgcgaagtgaacaggaaaacagtccggcagctacgcgtcggctgtttagttttcaggctggcgcactggcgggcgggcaaattgttagtcaagcagcaaaacgcagtgccgatggcgagctgctgttagctacccgcaaccgcttaagcagcgttgtgccgctgagccctgatgcctggcaaatgttgagcgcgccgttacgccagccgggcattgtggctttgcgggaatatttacgccagcgtccccccgcctgcatacggcctcttaatcaggtcgataacttatttattctgccggtcgctgagtgtattagcctcggttgggacagcagccgccagacgctggatgcgcaggtcattagcggcgaaggggaagataatgtgctgacgttaagtttaccagccagtgccagcgcaccttatgccgttgaacgcatggcggcgcttttgcaacaaacagacgaccccgtgtgtctggtttctggctttgtcagttttgttgaagggcaattgacactggaaccacgggtgatgatgacaaaaacccgtgcctgggcgctggacgcagaaactacgcctgtggcaccgctaccttctgccagcgttttgcctgtgccgtctactgctcatcagttgctgatacgctgccaggcgttacttattcaactgctccataacggctggcgctatcaggaacagagtgctattggtcaggcataattgctggcgaatgacctcaccgcggtgggtttttatcggctggcacatgtgttgggacaatttcgtaatacagaaagcgaggcacgggtagaagcaatgaataacggtgttttgctttgcgaacaattattccccatgcttcagcaacaaggatgaaatagtgctttttactaagagttctactccagttccggactgctcacgccacggtattaggcatatcctatatagcccctggtgagagtcaccagttccttgattaaataaaatggagttttacatgaaggctttcaataagctgttttccctcgttgttgcatctgttctggttttctctcttgctggctgcggtgacaaagaagaaagcaagaaattcagcgccaatctgaacggcactgaaattgccattacctatgtctacaaaggtgacaaggtgcttaagcaatcttctgaaaccaaaattcaatttgcctccattggtgcaaccaccaaagaagatgctgccaagacacttgagccgttaagcgccaaatacaaaaacatcgcgggtgttgaagaaaaattaacctataccgatacctacgcgcaggaaaacgtgactatcgatatggaaaaagtggattttaaagccctgcagggtattagtggaatcaacgtttctgctgaagatgccaaaaaaggtatcactatggcgcaaatggaactggtgatgaaagccgctggttttaaagaagtgaaataatcggttggcggtcatgctctaaacatgaccgccaattttttagccttttttcacatgctggcgcgctgccagtccacgcagaaaataacgtaaaaattgatcgccgcattcgcggaagtttttatgatccggtgcgcgcatcatcgctgtaatttccggcatgctaacgcggaactgctgttcggtgaggatagccagaatgtcatcggttttcaggctaaacgcgatgcgtaattttttcagcacgatgttgttattaatgcgacgttccggctccagtgccggagcagactcatccttgccgcgtttttcataaatcaggccattgaggaaactgctcaaaacaatgtccggacaacgctgaaaaccctcttcgtcttctttacgtagccagacggcgatctgttccgcggtggcttcgacattacccagcgccagaatacgcaccaggtcattattattggctttcaaaatgtagcgcacgctgcgcagaatatcgttacttagcatgaggccttcaggtgttgatgaggcaaaaagccattttagcagtcttttacaggccaatcgcctcttttaagcttttcagataacggcggctgaccggcacggttaagccattacgcaaaatcaactcggcctggccgttatcttccagacgaatctcctgtaaatgcgcgaggttaaccagatactgacgatggcagcgcagtagtggtgtacgactttccagggtacgtaatgtcaattcggtaaagccctctttcccttcgtggctggtaacgtagacaccgctcatccgactgctgacaaatgccacatctttcatttgcagcaaataaatccgactatgccccgtacaagggataaatttcagcgcctgttgattttccggtaacaggctaacatcctgcttgctgcgctcctgacgcaatcgcgccagcgttttctccagtcgcgcttcatcaattggcttcagcagataatcaaaggcatgttcttcaaaggctttaattgcgtattcgtcaaacgcagtgagaaaaacaatatacgggcgatgttccgggtcaagcatccccaccatttccagaccactgatgcgcggcatctggatatcgagaaacagcacatccgggcgcagtttatgcaccgcgccgatcccttccacggcgttactacactctccaacgatttcaatatcgctctgctcctgcaaaaatacacgcaggttctcccgtgctaacggttcatcatcgacaattaagactttaatcatgcctcgtccctccatggtagtcgtaacgttattcgggtgtaactatcaggctcacaggcgacgcttattccatagtcatcgccaaaccgttcacgtaaacgcttatccaccagattcatccccagcccactggcattggttaccggttgatacaaaccggcattgtcttcgatctccagcatcaaatgttgcccctcacgtcgggcgctgattgccactcgccctgtatccagcagttgacttgtcccatgtttaatggcgttttccactatcggttgcagggtaaacgcgggcaattgctgctgggataattcttgcggaatagcaatgttgacctgcaaccggctctggaagcgcgccttttcaatttgcagataagcattcacatgttcaatttcgtcggcgagagtaacaaactcgctaggccgctttaagtttttgcggaaaaaagtggaaagatactgcaccagctggctggcctgttcgctgtcgcggcggatcaccgctttaatggtgttaagcgcattaaacaaaaaatggggattcacctgggcgtgaagcagtttgatctcactctgggtgagcatcgctttttgccgctcatattgcccggcaaggatctgcgcgctaagcaattgcgcaatcccctcacccaacgtgcggttgatgctactgaataaacggtttttggcttcatacaatttgatggtgcccatcacccgctgattttcaccacgcaacggaattaccagcgtgctccccagtttgcattgcggatgcaaagagcaacggtaaggtacttcgttgccatcagcgtagaccacttcaccggtttcaatcgcttttaaagtataagtactagaaatcggtttgccgggtaaatggtggtcgtcaccaattccggtaaaggccagcaatttctctcgatcggtaatcgcgactgcaccaatatccagttcctgatacagcacctgagccactttcatgctgttcacttcgttaaacccctggcgcaaaatgccttccgtgctggctgccactttcagcgcagtggcagaaaaagcgctagtgtatttttcaaacatcgcgcgtttatcgagcaatatacgcataaacagcgccgcgccgacggtattggtgaccatcattggcgcagcaatattactcaccagacgcaccgcatcttcataaggtcgggcgatcgcaaggatgatcagcatttgcaccatttcagcgacgaacgtgacggcaccggcggtaatggggttaaagactttatcagtgcgcccgcggcggatcaggatgctgtgtaccaggccaccgagtaatccttcaacgatggtgctgatcatgcaacttaacgcggtcatgccccccatgctatatcgatgtaagccgccggtcagcccaaccagcccaccgacgaccggaccgccgagtaagccgcccattaccgcgcctatcgcacgggtattggcaatagaatcgtcaatgtgcaacccaaaccaggtgcccatgatgcagaagatggaaaagacgatgtagcagagaaatttatgcggcagacgaaccgtgacctgcattaacggtatgaataatggcgttttactcattaaccatgcaatgactaaaaaaacgcacatctgctgaagcagcagcaacaccagattaaaatcgtacatacccgcaaaccacacttccctttaaaacgcgtaacatacattgcctgcgtttaactttctttgaactcttgcagaaaaatgagaattcgtgagtacgatcactcaaaatcgcctggcaaaaataaaatcaccctatagatgcacaaaaaacgggcaaaactacctggttcgcaaaactgcgtctaaagttaaaccgggacctcgcgagcaagggtgagacgatggcgctttacacaattggtgaagtggcgttgctttgtgatattaatcctgtcacgttacgcgcgtggcagaggcgttacggattgctgaaaccgcaacggacagacggcggtcatcggctgttcaacgatgccgatattgaccggatccgcgagatcaaacgctggatcgacaacggcgtgcaggtcagcaaagttaaaatgctgctcagtaatgaaaatgttgatgtgcagaacggctggcgcgatcagcaagaaacattactgacttacctgcaaagcggcaatctacatagcctgcgaacgtggatcaaagagcgcggtcaggattaccccgcccagacactcaccacacatctgtttattcctctgcgccgacggcttcagtgccaacaaccgactctccaggcgctgctggcgatcctcgacggcgtactgatcaactacatcgccatttgtctggctagcgcacgtaaaaaacagggtaaagatgcgctggtggttggctggaatattcaggataccacccgtctgtggctggagggctggattgccagtcaacaaggatggcgcattgatgtcctcgcccacagcctcaatcaactacgccctgaactattcgaaggccgtacattgctggtgtggtgcggtgaaaatcgaacctccgcccaacagcagcaactcaccagttggcaagaacaaggccatgatattttcccactcggcatttaatgattcgttaacaaatgcgctttactgtacaatcctttcgttaacataaggagtgcattatgcgcatagctaaaattggggtcatcgccctgttcctgtttatggcgttaggcggaattggtggcgtcatgctcgcaggttatacctttattttgcgtgctggctaagcgcctgcaccagcctttcaaacaggcggtctgcgatgatcgccgccagtgccaccagtaacgccccctggatcacatacgcggtattaaatccgctaagcccgatgatgatgggcgtacccagcgtgctggcccctaccgtactggcgatcgtcgccgtaccaatgttgataatcacgctagttcgcacgcccgccagaatcaccggagccgccagcggtagctcgaccttacgcactcgctgaccacgactcattcccatacctttcgcaacttctgtcacgctggcatcaatcgctcccagcccggcaagtgtcgcctgcaggacgggcagcacaccgtaaaggatcaaggcgataatcgctggttgcagaccaaagccgatcaccggaacggcgatcgccagcactgcgacgggcggaaaagtctgtccaacggcggcaatagtttccaccagtgggcgaaattccgcgccccacgggcgagtgacagcaattccggcaccagtgccaatgatcaccgcaaacaaactgctaattcccaccagccagaaatgagccagtgccagagctgcaaaactttcttgctgataaacgggtcgtggcagttgtgggaacaaggcagcaaacagcggctggctgtaaggcagccagaaaatcagcgccacaaacagagcaatgagccagaacagcggatcgcgcaacatcttcatacgcttacgcctccaccagcagatcctgaaaatgcagcgtgccgcaaggctggccctgcatgttcaccaccggcagcacctcgcatccccgcgcaacaaacagagagagcgcatcgcgtagcgtcatctcttctgccagtgcctcaccatctgctcgttcttcgcgacgcacgtaatccgccacactacgtaagctaagcaggcgcacacccagttcactacgtccaaaaaactggcggacaaaatcattcgccggacgagtcagcatcgtcagcggattgccctgctgcactacttcaccgtgatccatcaataccagatgttctgccagccgtagcgcctcatcaatatcatgagtgaccagcacaatggtacgccccagcaaacggtgaatgcgcgtcatctcttgttgcaacgcgccgcgcgttaccgggtccagtgcgccaaaaggttcatccattagtaagacttgcggatcggcagccagtgcacgcgccactcccacacgttgctgctgaccaccggaaagctgatgcggataacgctcacgcaaattactctccagccccagtagcgccattaattcgtcgatacgatcgtcaatccgcgcccggctccatttttgtaattgcggcacggtagcgatgttttgcgccacgctccagtgggggaacaggccaatagattgaatggcatagcccatccggcggcgcaactccagtactggcaggctgcgaatttcttctccggcaaagcggatctctccgctgtcatgctccaccaggcggttaatcattttcagggtggtggatttgccggagccagatgtgccaatcagcacgctaaaactcccttcctgaaaattgagattgagatcgttaacggctttttgtgcgccgaacagtttgctgacatggctaaattcaatcattacgtttcaccttcagcagtgcgataagcaaatcgaacagcgcgtcggtaagcaccgccagaacaattaccgggatcacccccagcaacactaaatcaatggcgctgcttagcagcccctggaaaaccagcgcaccaaaaccgcctgcgccgattaacgccgcaatcaccgccatacctacagtttgcaccatcaccacccgcaggctgcgcagaaataccggtaacgccagcggtaactgaacatgcaggaaacgctgcgccccgctcatccccatcgctctggcgctttccagcacatcgcgcgggatctggttcaaaccgactaccacgccgcgcaccagcggcagcaaggcatagagcaccagcgcaatcagtgcgggtgtcattccggttcctgctatgccgagcgtccccagccacggaaaggccgtaaccagcgcggcaagcggcgcaatcaacaggccaaagagcgccacgctaggcacggtctgaatcacattgagcagagaaaaaattgccccctgccgagcagtggaaaagtagcaccagatgcccaacggcacaccaatcactaacgcaggcagcaccgcaccaaacagcaacgtcagatgttgtgccagcgcgtcgtcaaacacatcctgacggttggcgtattctttcattagactgagatcgttaagcgtgccggagtacagcaaccacagcggaataatggcaatctgcatatgcaacaaccagcgccacagcggatgcgtggagattcggcggatggcatcgctacaggccagcaatgccagcgccgcagccagccagaaaccactgccgaggctggtacgcgccagcgcactgccattttgcgccagttgggtcgccgcctttccagctccccacaccagcaatacgaagacgaattgcgccagaatgagtgcacaaatgctgccttttttaccgggaataaaacaggccgtcagccaggcgcaaccaacgcccaccagcatccagatcgtttgcggccacagctgccagagatgacgcccctcaccgctaactaaacgattaggcgcgtaactgataaacggcagcgccgctgcgattgccgtcagcaacagcagcagcgccagaacaggattaatacggaaataagtcacgggaaattacttcgtccaccctttttgtttcaggtagtcggcagccacttttttggcatccagtccttccacagcaatgctggcattcagttgctgcaatgtttttgcatcgaggctggcgaagactggctgtagccactgtgccatttgcggatactccctcaacacgctctcacgcaccactggtgcaggcgcgtagataggttgcacaccttgcggatcgcttaaggtttgcagccccagcgccgctaccgggccgtcagtgccgtaagccattgcagcattaacgccagaggtttgctgggcagcggctttgatcgtcaccgccgtgtcgccaccagccagactcagcaactgatcctgaccgagcttaaagccataggctttttcaaacgcgggtaacgcatcggcgcgttcgataaactctgcgctggctgccagtttgaaggtgccgccctcttgcagataacgactcaggtcggcaaggctagtgagtttatttttctctgccacatcctgacgcacggcgatagtccaggtgttatttgcaggcgcgggcgtcagccagattaacttgttgtgctcgctatcgagctttttgactttctcgtaaccttgctgcgcgtttttccacgctgcatcgttttcatctttaaagaagaaagcgccattgccggtatattccggatagatatccagttcaccggaagtaatcgccccgcgcaccacaggagtcgttccgagttgcactttattcaccgtcggtacgccgtggctttccagcacctgcaaaatgatattgccgagtagcgcaccttcggtatcgattttactaccgactttaacgggggaagccgcctgtagcggcaggctcacggctgccaacataaccagactacctgcccagagctttaagagtggcatgatgctttcctcattcttttactgttgttttcagcgaattaagagaaaagcatagttgataatggcggggttagcttgagcggaaggattcagttgcagaatcagataaatacttaagaggcatattcggtccggcgtttcctgccggatgcggcgcgagcgccttatccggcctacaaagggcgcaaacgtcgcgcccttactaaagcattacagcaactcaaactcgcctttcttaacgcgtgcggaatcagtgccgataaagacattgaacttgccaggctcggcgtcatatttcatctgttgattccagaacttcagcgcctcaatatcgatcgggaagctgacagtctgagtttcgcccggtttcagggtgattttctcaaagcctttcagctgtttcacagggcgactcatggaagccgtcacatcctgcaagtacatctgcactaccgtggcaccctcgcgcttaccggtgttcgtcacctgcacgctggcagtcactttgccgtcacgcttcatggtcggcgcagaaagtttcacatcagagacggtgaaagtggtgtagctcagcccatagccgaacggatacaacgccccgttagcttcatcaaaataacggctagtgtatttgttcggcttgtcggcattatacgggcgaccggtattcagatggctgtagtacaccgggatctgcccgacagaacgcgggaaggacattggcagcttgccggacgggttgtaatcgccaaacaatacatcggcaattgcattaccgccttcagtccccgcaaaccaggtttccagaatcgcatcagcctgctgatcttctttcaccagcgccagcggacgcccgttcatcagcaccagcaccagcggtttaccggtggctttcagcgccgcaatcaagtcacgttggctttgcggaatagtgatatcggtccggctggaggcttcgtgcgccatcccctgtgcttcaccgactacagccaccaccacatcagattgtttcgccgtctgcaccgcttcatcaatcatctcttgcgggctacgcggatcgactttgaccgcttcttcatactgattcaggaaatcgataatgcctttgtcactggtaacgttcgcccctttggcatacagcactttaccgttttcaccgacggcatttttaatcccggtcagtacggtcacggattgatcggcaacaccggctgcggaccagctgcccatcacgtcacgtttactgtccgccagtggcccaaccaccgcaatggtggcgctttttttcagcggtaacgtttcgagacggtttttcagcaacaccaagctttcgcgcgccacttcacgcgcttctttacggtgcaggcggctttcggcattggtatccaccgggtcagactctttcggccccaaatggctgtatgggtcgttaaacaaccccatatcatatttaacgttcagtacatggcgggcagcatcgtccagctctgccatcgtcactttgccggatttaatcaacccaggcagatacttgctgtagtactcgtcgctcatgctcatgttgattccggatttcagcgccacgcgcaccgcatcttccgggtctgccgccgtgccatgtttaatcagctctttgattgcaccgtgatcggaaacggtgatgcctttaaagccccactggtcgcgcagaacatctttcagcagccaggaatcggaggtggctggcgtgccgttcaggctgttcagcgccaccatcaccgcgccgctgcctgcgtccagccccgctttgtacggcggcatataatcattaaacaggcgctgcggactcatatcgacggtgttgtactctttaccgccttctaccgcgccgtatgcggcaaagtgtttgacgctggtcatcacgctgtagcgatctgccgggcttttaccctgcatcgcttccaccatggttttacccattgtactggtgagatacgtatcttcgccaaaaccttcggaagcacgtccccagcgcggatcgcggctgacatcgaccatcggtgcccaggtcatattcaggccatcatctgccgcttcataagcagagacacgtccgaccgttttcactgcatcgaggttaaaagagctggccagaccgaggctaatcgggaacaccgtgcgctgaccgtgcagcacgtcgtaagcaaagaaaagaggaattttcaggcggcttaattccatcacctgatcctgcatggcgcggatatcctgacgggttacggtgttgaaaatcgccccaacctgaccgtctttgatcatctcgcggatcgcctctttcgggttatccgggccgacgctgattaagcgcagctgaccaattttctcatcaactgtcattttcttaagcagttcggtgacgaacgcatcccgcgcttcgggcgttaatggatggttgccgaataaatcatccgccagtgctggctgcagggccagactcaccgcgattcctacactacatagccatttcatatggatttttcttcctttgttgcccgacgtggcagcgaaaatggtgcaaaaaccgtagtttgccataagcatgatggagagagaaaaagaatgctcagtttattgtctgaattttcaaaatattcactcgctgaattgttatacaaggcgctattctagtttgtgatattttttcgccaccacaaggagtggaaaatgtcttccatgacaacaactgataataaagcctttttgaatgaacttgctcgtctggtgggttctagtcacctgctcaccgatcccgcaaaaacggcccgctatcgcaagggcttccgttctggtcagggcgacgcgctggctgtcgttttccctggcagtctactagaattgtggcgggtgctgaaagcctgcgtcaccgccgacaaaattattctgatgcaggccgccaatacaggcctgaccgaaggaagcacgccaaacggtaacgattatgatcgcgatgtcgttatcatcagcaccctgcgtctcgacaagctgcacgttcttggcaagggcgaacaggtgctggcctatccgggcaccacgctctatagcctggaaaaagccctcaaaccgctgggacgcgaaccgcacagtgtgattggaagtagctgtataggcgcaagcgtcatcggcggtatttgtaacaactccggcggcagcctggtgcaacgtggcccggcgtataccgaaatgagcttattcgcgcgtataaatgaagacggcaaactgacgctggtgaaccatctggggattgatctgggcgaaacgccggagcagatccttagcaagctggatgatgatcgcatcaaagatgacgatgtgcgtcacgatggtcgtcacgcccacgattatgactatgtccaccgcgttcgtgatattgaagccgacacgcccgcacgttataacgccgatcctgatcggttatttgaatcttctggttgcgccgggaagctggcggtctttgcagtacgtcttgataccttcgaagcggaaaaaaatcagcaggtgttttatatcggcaccaaccagccggaagtgctgaccgaaatccgccgtcatattctggctaacttcgaaaatctgccggttgccggggaatatatgcaccgggatatctacgatattgcggaaaaatacggcaaagacaccttcctgatgattgataagttaggcaccgacaagatgccgttcttctttaatctcaagggacgcaccgatgcgatgctggagaaagtgaaattcttccgtccgcattttactgaccgtgcgatgcaaaaattcggtcacctgttccccagccatttaccgccgcgcatgaaaaactggcgcgataaatacgagcatcatctgctgttaaaaatggcgggcgatggcgtgggcgaagccaaaagctggctggtggattatttcaaacaggccgaaggcgatttctttgtctgtacgccggaggaaggcagcaaagcgtttttacaccgtttcgccgctgcgggcgcagcaattcgttatcaggcggtgcattccgatgaagtcgaagacattctggcgttggatatcgctctgcggcgtaacgacaccgagtggtatgagcatttaccgccggagatcgacagccagctggtgcacaagctctattacggccattttatgtgctatgtcttccatcaggattacatagtgaaaaaaggcgtggatgtgcatgcgttaaaagaacagatgctggaactgctacagcagcgcggcgcgcagtaccctgccgagcataacgtcggtcatttgtataaagcaccggagacgttgcagaagttctatcgcgagaacgatccgaccaacagcatgaatccggggatcggtaaaaccagtaaacggaaaaactggcaggaagtggagtaaaaattacggatggcagagtatcgccatccgaattcacttaatcgttctgtgccgtctgccccgccgccgccatttgggcggctttttgttttttatagctcaacgctgctgccggcacaggcatcactttaccggtttcaatccaggtacgcaggcggctggcatcggcaaaatgggtatatttgccaaacgcgtccatcactaccagcgccaccggtttattattgataaccgtacgcatcaccagacaatggcccgccgcattggtaaagccggttttggttaactgaatattccagttatcgcgatacaccagatgattagtattgcggaacggcagcgtatacgtcggattagagaaggttgccatatcttcccgggtagtacttaactgcccgatcaacggatattgtttgctggcaatgagcagtttggttaagtcacgggcagtactaacgttatgcacgctcaatccggtaggttcaacaaagcgcgtgttgttcattccgaggcttttcgctttcgcattcattgccttaataaaggctttgtaaccaccgggataatggtgcgcaaggcttgccgccgcgcggttttcactagacatcagcgccagcaacagcatatctttacggctgatttcgctattcagtcgtacgcggctatagacccctttcatctccggcgtctggctgatatccacttttagtttttcatccagcggcagtcgtgcatccagcacaaccatcgcggtcattaatttgctgatagacgcaatcggacgcaccagatccgggtggttgctatagatcactttgttggtattcagatcaacaatcatcgcgctaccggaggcaatttccggttgactagcggtggtagcggctgccgttttcgcaacggcctgcggtgcaaaaggcacagccagcatcagggccaggctaaataaagaaactcgaaatttcggcatgatgagcattcagatagtggttcacgcgcacgggttgcgcaccgccggagtaaggatttactgaggctagcgacgccatcataacgagcaaaaagtgcgatcgtcaaaggagaatcgtgaggaaatgctgcattgctgacatttacgccagcaatgcaacgtcaaagaactttttagaacaaacgataaccgtagccccatagtataacggttagggcgagcagcacttccagtaccagcacgccaatcgccagcgtgctactagagaagctaaggccttcctctttgttgatattcaggaagctcggaataccaaggtaaagcaggtagccggtgtaaaacagcgccaccgtgccgaccagcgcacacaaccagaccagtggataaagcgccaccagaccgcttaaaaacagcggagttgcaacgtagcccgcgaagaccatgcagtgcgcaagactcggacgctgcggataattacgcgccatccaccagatgacccgccccatcaccgcgaccccagccagcataacgccgtaaaacaagacagccagcgccagtccggtaaaccaggataacttcaggatagtgccatcgccaaaattccagccaatctgtgtagtgccaatgaaggcgcaaatcaccggaatcgccgccatcagcaaaacgtggtgggtgtaatggtgagaaatcgtttcgttttcgcgattaatcacctgcatttcacgatcgggatgggaaaacagtccccagacatggctcataccgcccccttgttgtgagttcatgaacctgacagttcaagtataagtcagcttgtgattattttttgttcgcccatgtaattttcactgtctgatgaacgtcctttttcagcgtgaatgattcacagggtgtatgcttactggcaaccaaagggagacagactggcctatggatctcaatacacttatcagtcaatatggttatgccgcgctggtgatcggtagcctggcggaaggtgaaaccgtgactttgctgggaggcgttgcggcgcatcaggggctattaaagttcccgctggtggtactttctgtggcgcttggcggcatgattggcgaccaggtgctctatctgtgcgggcggcggtttggcggcaagctgttacgccgtttcagcaaacatcaggataaaattgagcgggcgcagaaacttatccaacgccatccgtatctgtttgtcattggtacgcgctttatgtatggctttcgggtgattggcccgacgctgattggtgccagccagctgccgccgaaaatctttctgccgctgaatattctcggcgcatttgcctgggcgttgatttttaccactattggttacgctggtggtcaggtgattgcgccgtggttgcacaatctcgaccagcatttgaagcactgggtctggttgattctggtcgtggttctggtggtgggcgtgcgctggtggctgaaacgacgcgggaagaaaaagccggatcatcaggcgtaaaaccattgccctggataaggcgttcgcgccgcatccgacatccggagtaccatgcctgatacgacgcttgtgcgtcttttcatgccgaccaaaatattacccaatgaaatatccacgcacctcactgcgttattctgggttgaactgtggattcgccaacataaagccgccatccactatcaagctctgcccggtggtgtaatttgcgccctcgctacaaagccacaccaccaggctggcaatctcatgcgttgcgccaaaacgccgcaagggaatgctaggctccgcgtcgggcttcacgtcgctgtcatccatgccattcattggcgtggcgatcgccccaggcgcgactgcgttcaccaaaatcttatgcctgaccagctccagcgccatcgctttggttaacccaccgagcgcatgtttagcggctgtgtaggcgctggcatccggcagcggcgtatgttcatgtacgctcgtaatgttgatgatgcgaccgccctgcccttgtttcaccatctgacgagccgcaatttggctgcataagaatgcaccatcgacatcaacggtaaaaatcttgcgccactcatcaaaagccatatcaagaaacggcgctttggtcattgcacccgcattattcaccagcacatcaatgcgccccagccgttgaatgagtttctccagcgccagtgccccttctggtagattgccgagatccagctgcacgatctccgcacgtacgccgtggctaactacctcacgcgcggtatcttttgccccttcttcatcactgtgccaggtaataccaatatcaaacccctgctgcgccagtaataacgcgcactctttgccgatcccgctatcggaggcggtaataatcgcaacctgtgccatcgagttctccacttaacgctgaataaacgttaagtatagaaggcgcatatcatcagcgtttgtaccccccgcccaacgcaccagtgagttgaatggaggcatccagccactgcccttgcaataacaggccattggcccgctcacgcagcgcggggattctggcttcgctgacgcgggaaccagcaatgatgcccgcgttaaagcgcgcctgcgcaagacctaccacacgcaaggcatcgcgctcaatttgcgcctgatgctggtttttctccgccagtgtctgaacctgactggctgcccgcgccacgtcattcaccgcttcaaccaccgctttgttgtagctggcgatagacaagttgctttcggcttttgcgatatcgagattggcgttaagacgaccactatcgaaaatgggtagcgtcaggcctgccgtaacgcccatttgctgcgcggaatgacggaacagatcgcttaagtgcaacgcatcctgttgcaggaaggccatcaggttgatgtcaggataaaatgccgcttttgccgcatcaatggtgcttaggctactctcaacgtaccagtgcgccgcctgcaaatctgcccgccgggccagtaaggagtaccccagttcatcaggaagctggcttgccactttcggcaacgcgaccggtttaagcttcaaactctttgtctggttatttgtaagtgcgcttaaccgtgcctcaataattttcattttccccgcgacatcgttgagctgctgccgggttttgctggcattaatatcggtttccacaccttcaacactagaagtaatcccgttctgatatagctggcgatcggtcgcgataatggtgttctgctctttttctatttgctgcaagaccgtgtttaacgccgcctgggtttgccactcccagtacaggcgggctacgctgccagccagcaattggcgggtttgctcgcgttccgccgcccgtgctttaaccgtacccaggcgggcagtaacctccgcccgattctttccccagatatcgagatgccagcccgccgttaagccaaaagtaccgttggtgtaccacgggccggtcgtacctgcggccggatcgttcagagcaaacggccccattaagccttctgcgctcattttttgccgctccatatccgccgaaaagtcgatctgcggaccatcctgagtggcaactgccttcgcctgggcttcagctagctgaatgcgctgttcagccacctgcatatccggtgcgttctgtagtgcattgttaattaaggaagactgttgattatcgtgatactccagccaccattggctgtctggccaaccattttcagcgccgtgggtaatgcggtgtcaacttgtgcagcgggcgtttgctggcttaacgcctggcgggtttcatgcataggcgcacacccggccagcatcagtaacagcggaaaacaggcgatggctggataaaaggaatcacgattcatgggggaataatcaggtaagaaaaggtgcgcggagattaccgtgtgttgcgatatattttttagtttcgcgtggcaatacatcagtggcaataaaacgacatatccagaaaaatatacactaagtgaatgatatcttccgatttatcttaatcgtttatggataacggcaaagggcttcgttttttcctatacttattcagcactcacaaataaaggaacgccaatgaaaattatactctgggctgtattgattattttcctgattgggctactggtggtgactggcgtatttaagatgatattttaaaattaattaatgtcatcaggtccgaaaataacgagaatatttcagtctctcatcctgttgcgctcctgtcatgtgcattgcttcatataatcactggcgcaaggagcgcgcagggggcggccaatcgccgccgccccctgcacccccgggctctggcgaacaaaatcgccgctgcgcggtgccctcggcttatcccttacggctaccgggtcgggcgcgaggtaacatccctgtaaaacgcgccctcagcccacatccatgtgggctgccccggccttcagggaacgcctcggcaattttgacgccaccaaacaaccgtgcggcctattgataaagagctaacacattgtcaaaaaacatcactatggttttttagagtttctcgatatcaattgcctgaatagcccttgcaatatcaggggaattattcaacacccgaacatgctgaaataattccgttgcttcatcgtattctttacgcaaataactcaaccactgtttaatccgcgcaacgtgatataacccggtatcgccctgcttttccagacgggtatatttttgcagcaaagcaaccacctccggccacggcattcgcggttcgttatattttaccacccggctcaggttgggaatattgagcgccccgcgaccaatcatcactgcgtcgcagccgctgatcgccatgcattgttgcgcgctctgccagtcccagatttcaccgttggcaatcaccggaatattcagccgctggcgaatatcgccaatcgcctgccagtcaatatgctccgcgcggtaaccctgctctttcgtccgcccatgcaccaccagctccgtagcgccagcctgttgaaccgcatcggcgatttcaaatttcttctcaccgctgtcccagcccagacgcactttcacgctgacgggcaaatgcgccggtacagcttcacgcatcgcttttgcaccctggtagatgagttcaggatctttgagtaacgtcgccccgccgccgctaccgttaaccgttttgctcgggcagccgcaattgagatccacgccccaggaacctaactccaccgcacgggcggcgttctctgccagccattgtgggaactgacctaacaactgcacgcgcaccagcgtaccagatggtgtccggctggcgttttgtagctcagggcaaatgcgatgaaagacttttaccggcagcagttgatccaccacgcggacaaactcggtgatgcacagatcgtagtcgttaacttcggtcagcaattcacgcaccagagagtcaagcactccctccatcggtgccagtaacacacgcatatcatcacccgcaaaaaaatgaggcgctatgttagcgcctatggtcagcggattaaaggtctgcaaagagggattgctgcaaactgcaatccctctctatgcttgatgtatgcctgagttcgctgcgcattgcgtaatgccggggagcgaaaaaataagcgctgatttcttaatgtgatcggtagcacgttttacgaattaattgtatgatgaatccatctcatctggggtgttgattatgagtaagacactgaacattatctggcaatatttacgcgctttcgtcctgatttatgcctgcctgtatgcaggcattttcattgcttccctgctaccggtaaccattccgggcagcatcatcgggatgctgatcctgtttgtcctgctggccttgcaaattcttccggcaaaatgggtcaatccggggtgctacgtactgattcgctatatggcgctattgtttgtgccgattggcgtaggcgtcatgcaatattttgatttgctccgcgcacagtttggcccggtagtggtttcctgtgcagtcagtacgctggtggtttttctggtggtgagctggagtagccaactggtacacggtgaacgtaaagtcgtaggtcagaaaggaagtgaagaatgatggcgaatatctggtggagtttaccgctgacattgattgtcttttttgccgcccgcaaactggcggcacggtataagtttcccttgcttaacccgttgctggtagcaatggtggtgatcattccttttttaatgctgactggcatctcttacgacagctactttaaaggtagcgaagtgctaaacgatctgctgcaaccggcggtcgtcgcgctggcctatcctttatatgagcagctacaccagatccgcgcgcgctggaaaagcatcatcaccatctgttttatcggcagcgtggttgcgatggtgacggggacttccgtggcattgttgatgggcgctagtccggaaatcgccgcgagtatcctgccgaaaagtgtcaccacgcctattgcaatggcggttggcggcagtattggcggtattccggcaatcagcgcagtttgcgtgattttcgtcggcatcctcggcgcggtatttggccatacattgcttaatgcgatgcgtattcgtaccaaagctgcgcgcggtctggcaatggggactgccagccacgccctcggtacggcgcgctgcgccgagctggattatcaggaaggtgcatttagtagcctagcgctggtgttatgcgggataattactagcctgatcgcaccgttccttttcccgattattctggcagtaatgggctaaaatttgcgatgcgtcgcgcatttttgatgtatgtttcacgcgttgcataattaatgagattcagatcacatataaagccacaacgggttcgtaaactgttatcccattacatgattatgaggcaacgccatgcatccacgttttcaaaccgcttttgcccaacttgcggataacttgcaatctgcactggaacctattctggcagacaagtacttccccgctttgttgaccggggagcaagtcagtagcctgaagagcgcaacggggctggacgaagacgcgctggcattcgcactacttccgctggcggcggcctgtgcgcgtacgccattgagcaattttaatgttggcgcaattgcgcgcggtgtgagcggaacctggtatttcggtgccaatatggaatttattggtgcgacaatgcagcaaaccgttcatgccgaacaaagcgcgatcagccacgcctggttgagtggtgaaaaagcgcttgcagccatcaccgttaactacacgccttgtggtcactgccgtcagtttatgaatgaactgaacagcggtctggatctgcgtattcatctgccgggccgcgaggcacacgcgctgcgtgactatctgccagatgcctttgggccgaaagatctggagattaaaacgctgctgatggacgaacaggatcacggctatgcgctgacgggtgatgcgctttctcaggcagcgattgcggcggcaaaccgtagccacatgccttacagtaagagcccaagcggtgtcgcgctggaatgtaaagacggtcgtattttcagtggcagctacgctgaaaacgccgcattcaacccgactctgccaccgttgcagggagcgttaattctgttgaatctcaagggttatgattacccggatatccagcgcgcggttctggcagaaaaagccgatgcgccgttgattcagtgggatgccacctccgcaacgctgaaagctctcggctgtcacagtatcgaccgagtgcttctcgcttaagcctggtgccggatgcggcgtgaacgccttgtccggcttgccagccctctcctggtgtcgaaattcccggcaaacagtttgccgtttcttgcgcaaaaccagcgggtaaagtagcctgatggaaattttccttagatcgagtctcctgcatgttaaagcgcgtgttcctcagcctgttagtcctgatcggcttgctgctgttgactgtgctcggcctcgatcgctggatgagctggaaaaccgcgccttatatctacgacgaattgcaggatctcccctaccgccaggtcggtgtggtgctcggaacagcaaaatattatcgtactggcgtaattaatcagtattatcgctaccgcattcaaggagcgattaatgcctataacagcggtaaggtaaattatctattactgagcggcgataacgcattgcaaagttataatgagccgatgaccatgcgcaaagatttaatcgctgctggtgtcgacccaagtgatattgttctcgattacgcaggctttcgtacgctggattccatcgtgcgtacacgcaaagttttcgatactaatgatttcattattatcacccaacgtttccactgtgagcgagcattatttattgcgctgcatatggggattcaggctcagtgttatgccgtaccgagtccgaaagatatgctgagtgtacgtattcgtgaatttgccgcccgtttcggtgcgctggctgacctttatatttttaaacgtgaaccgcgttttttagggccgctggtccctattccggctatgcaccaggtaccggaagatgcgcaggggtatcccgccgtcacacccgaacagttacttgaattacaaaagaaacaaggaaagtaattatggatgtacagcagttttttgtcgttgccgtttttttccttatcccgatattttgtttccgcgaagcatggaaaggctggcgcgcaggcgcgattgataaacgggttaaaaatgcaccggaaccggtgtatgtctggcgagcaaaaaatcccggactctttttcgcttatatggtggcatatatcggcttcggaattttatctatcggcatgattgtttatcttattttctatcgttaatattcccctctccagttaattattgagaataattattacttcacctgataagctgcggatatcacattcctaaccgcagctatttgtgaatcttttcacagtttaaattcccccgcacgcttagccttaatatcagtacattattatttactaaacgctcgccttaattacctatagcattaaggaagatcacatgccgcaacaaaattatctggatgaactcactccggcttttacgtctttactggcgattaaagaagcctctcgctgtttattatgtcacgacgctccctgtagtcaggcttgcccggcacagaccgatccggggaaatttattcgcagtatctactttcgtaattttaaaggcgctgccgagacaattcgcgaaaataatgccctcggtgccgtttgtgccagagtgtgcccgacggagaaattatgccaaagcggttgtacccgtgccggtgttgatgctcccattgatatcggccgcttacagcgttttgttactgattttgaacaacaaaccggaatggaaatttatcagcccggtactaaaacgctcggcaaagtcgcgattattggcgcaggtcctgccggattgcaggccagtgtgacactgacaaaccagggttatgacgtcacgatttatgagaaagaagcgcaccccggtggctggttgcgtaacggtattccgcaattccggttaccgcaaagtgtgctggatgcagagatcgcccgtattgaaaaaatgggcgtgaccattaagtgcaacaacgaagtcggtaacacactcacccttgagcagctgaaagcagaaaaccgcgcggtactggtcaccgtggggttaagtagcggttccgggctaccgctgtttgagcatagtgacgttgagattgccgtcgacttcttgcaacgtgcacgacaggcgcaaggcgatatcagcattccacaaagcgcattaattatcggcggcggtgatgtcgcgatggacgtagccagcacgctgaaagttctcggctgtcaggcggtaacttgcgtagcgcgtgaagagttagatgagtttccggcaagcgaaaaagagtttaccagcgcccgggagctgggcgttagcatcatcgatggattcacgccagtagccgtggaaggcaataaagtcacgtttaagcatgtacggttaagcggcgaactgacgatggcggcagataaaattattctcgccgtcggtcagcatgccagactagatgcctttgcggagttagagccgcagcgtaacaccatcaaaacacaaaattaccagacccgcgacccgcaagtctttgctgctggcgatattgttgagggtgacaaaaccgtggtctatgccgtgaaaaccgggaaagaagccgccgaggcgattcatcactatttagagggagcttgcagttgttaaattaatatttagagggagcttgctcatgttaacgaaagatcttagcattactttttgcggcgtgaagtttcccaacccgttctgcctctcttctagcccggtaggcaactgctatgagatgtgtgccaaagcctacgacacaggttggggcggtgtggtgtttaaaacgatcggcttttttatcgccaacgaagtcagcccgcgttttgatcatctggtgaaagaagataccggttttatcggcttcaaaaatatggagcagattgctgaacatccgttggaagagaatctggccgccctgcgtcggctgaaggaagattacccggacaaagtattgatcgctagcatcatgggggaaaatgagcagcaatgggaggagctggcgcgcctggtgcaagaagctggcgcggatatgatcgagtgtaacttctcctgtccgcaaatgacttctcatgcgatgggtagcgatgtcgggcaaagcccggagctggtagaaaaatattgtcgggcagtgaaacggggttccacgctgccaatgctggcgaagatgacgccgaatatcggtgatatgtgcgaagtggcgctggcggcgaagcgcggcggcgcagatggcattgcggcgattaacaccgttaaatccatcaccaatatcgatcttaatcagaaaatcggtatgccgatcgttaacggaaaaagcagtatttccggatattccggtaaagcggtaaaaccgatcgccctgcgcttcattcagcaaatgcgcacccatccagaactgcgcgatttcccaatcagcggtatcggcggcattgaaacctgggaggatgcggctgagtttttattgctcggcgcagcaacgttacaggtgaccaccggcatcatgcagtacgggtatcggatagtggaagatatggcaagcgggttgagccattatctcgccgatcagggatttgatagcctgcaggagatggtaggtctggcgaataacaatattgtcccggcggaagatttagaccgcagttatattgtctatccccgtatcaatcttgataaatgtgttggctgtggacgctgttatatttcctgttacgacggcggtcaccaggcgatggaatggagcgagaaaacccgcacaccgcattgtaataccgagaaatgtgtgggttgtctgctttgtggtcacgtctgcccggtgggttgtattgagctcggggaagtgaagtttaagaaaggcgagaaagaacacccggtaacgttgtaaaaccagagacgcatccggcatttggttcctgtcgccggatgcggcttgaacgccttatccggcctacaaaaccatacaaatcagtatgttgagcttattgtaggccggataaaacgcgccagcgttgcatccggcatttggctcctgttgccggatgcggcgtgaacgccttatccggcctacaaaaccacacagatcatgatgttatgtgcgtttatgaccgaatgcggaccacattcacatcatttcttacgcgcgtatttcagactatccagcgctacggcgaagataataatcgcccctttgatgatgtactgccagtatgggtttacgccgatatacgtcaggccatagttgatgacggtaaaaataattaccccggtcaccacgccaatcaccgtccccacaccgccgctgaagcttacaccgcctaccacgcacgccgcgatagcatccagctcatacataaagccgaggttgttggtggcagagccgatacgtccggcttctaacatcccgccaaaggcatagaacacgccagacaacgcgtagatcatcagcaggttcaggccgacgttgacaccagatacttttgccgcttccgggttaccgccaatggcaaaaatgttcttaccgaagcgggttttgttccacaacacccagacgaacgccaccgcaatcaacgcgtagaaggtgatgtaagagagacggaaactccccagcgcgacaaagccctgagcaaaggtagagaagccactgtcaaaaccagaaattgggctcgccccgacaaagtcgtaatagaggctgttgatgccatagacgatgatcatcgtgccgagcgtggtaatgaacggcgtcacgttgagataagcgataatcagaccgttgatcaaaccgatcaccgcaccaatggcacagacaatcagaataaccagcgcaatcggcatcgtcgccatttccgggaacactttgttggcgttatccatggactgcaataatgtcgcagccaccactgccgccagccctacctgacgaccagcagaaagatcggtcccctgggtgacaattaaccctgccacaccgagcgcgataataatacgcacgctactctgggtgagaatattacttaagttcaacagacttaaaaatgttgggtcctggaaaataataatcgccagcaaaactaaaagaacgacgtaaataccgccctctttcaggtaagtaagaaaacttttcttatttaacgcactcatgggaagcccctaatcttaaaggtgcaaagacgcaagacgcagaatttcgttttgcgttgttgtttttgtatcgacaattccggaaacgagaccattgctcatgaccagaatacggtctgttatccctaacaactcaggcatttcagaggagataataataatccccttgcctttcttcgccagttcggcaattaactgataaatttcaaacttcgccccgacatcaataccgcgcgtcggttcatcgagcattaatatttctggttgcgttagtagccagcgaccaataatcaccttttgctgattaccaccggagaggctaccaatttgcgtccgatgacccggcgtttttacccgcatgctatcaatcacccactgggtatcgcttttcatccggctgttatccagtaaaccaactttatttttgtagttgcgaatattggaaattaagctgttaaaaccaatatccagataggcataaattcccgtactgcggcgctcctcagttaccagtgcaaatccatggtttatggcttcgttggcattatggttattgatctgtttgccgtgcaacgttatggtgccagcgcttttctcgcgaataccaaataacgtctcaacaatatcggtacgtttcgcccccaccagaccggcaataccgaggatctcccctttatgcagatcaaagctgacatcgcgaatgctcggctggcgcagactcgtcaggttacgtacctcgaggatgacttcgcccggtttgttttctttgtcagggaaacgctggttaagagaacgcccaaccatcatggcgatgatcttgtccatcgtcagtcctgccagcggttcggtggcgatccactgaccgtcgcgcaatacggtaacttcatcacataactggaagatttcttccattttatggctgatataaacaataccgcagccgcgctcttttaatttacgaataatagtgaacagatgattgacctctttttcggttaagctagaagtcggttcatccataatcacaattttcgcgttataggaaaacgctttggcgatttcgatcatctgcatttggctaacggataatgtgccgacgcgcgcacgcggatcgatatcaatatccagttcgtcaaaaatcgctttggtttcgcggtacattttgtcctgatcgacaaacatgcctttggtgggatatcgccccagccacatgttatccatcacgctacgttgtaataccaggtttaactcctggtgtaccatgctaataccattttccagggcttcttttgcagaatggaaatcgatctctttaccctggaataaaatggtgccggagtctttttgataaataccaaacaggcattttaataatgtgctttttcctgcaccgttttcccccattaatgcatggatagaatgtggccggacttttaaattaacgttatcaagtgccttaacaccaggaaaggacttgttgataccgctcatttccaacaagtattccccggaggacggagtcgtactgctgaccatataattttaccttgttggccatacaataagggcgcagtaatagactgcgcccaatcagtcttatttcttgctgaattcagccaggttgtctttatctacgccaacataaggtacgcggaccactttgttgtcgattttccagttggtgccatcagccgcacctttaccatcggccaggtttttcgccagatcaaaggtcgctttcgcctggttgttagcatcgttcagtacggtgcccgccagtgcaccggatttcaccagcgccagcgcttctggcagcgcatcgacgccaaacaccggaatgctggacttgttgtgtgctttcagcgcttcaaccgcgcccattgccatcgcatcgttgttggcgataaccacttcgattttgttggcgttcgggccagacagccaggcgtccatcttatctttcgcctgagcggtgtcccacattgcggtatctaactgtaactgttcagttttgatgcctttatcgttcaattctttaatcacgtaagtggtacgtgcttctgcatccggatggcccggttcacctttcagcagtacgaactgaatctgaccgtctttgttcagatcccaaccctgattcgccgcccagtgtttagcaatcaaatcgccttgaataatgccggactctttggagtcagtgccaacgtagtaggctttgtcgtagctatccagcgccttacgagacggttctttgttgaagaaaaccaccggcacgttttgcccacgcgctttctcaatcaccgtacccgcagctgccgggtcaaccaggttgattgccagtgccttcacccctttcgccagcaatacgtcgatctgatcgttctgcttggactggtcattctgagaatcattcatcagcagctgaacatctggcgcggctttcgcatcttgctcaatagccttgcgcactacagacataaagttatcgtcgtacttatagattgttacaccaatgcgagtatcagcagcgtgtgcagcggcaccgaataacatgctggccatcacagcagacagggttaacaccttcttattcatggtatctccggtttttcttatgcagggtagtgcttgagataaatgctcggcggggcagtagagttaatgaagtgttactgaacgccgaagctcactttttaaaattcgttcttccatgcccggtaacgctccagaaaacggctttaattgttgttatgacgctgttacctcggcaaaagtgattattcactgttacatacgggttacaacgttaaaacggtgcaatcatagctatcacattgttaagatactgtgaaatcactcacagattgaaagcggttacatcgcctgatttgtactgttagtgatcgccgccgcattctggcgtgttgcgacagaatggcgacgcactaacgtcggcataaaacagtggctggcacgaggatcaatattgcctgctgccccctgcaaggccagttcggtggctaatttcgccatactagcaatgggataacgcacggtcgttaattgcgggtcggtgtaacgggcgatgggaatatcatcgaaaccgatgatactgagatgtaacggaatcgcaatgccattatcttttaatgctgtcagtgcgccagcggccatattgtcgttataagcaaatacagcggtaagttgtagattgcgccccagcagttcaaccatcgccgcctcaccgcccggcatgtccggcgtaccagcgccaatccagctttccggcggaataatatcctgctctttcaacgcactcatccagcctgctttacgcatggcgtcatcttcaatgccgtggctggaagaaagataaccaatacgttgatgaccgttattcagcaacatgcgcgtcgccattcgggcaccgctgagattatccaggcaaacgcaacgatgggcgtaccccggcacaacgcggttgattaacaccataccgggaatgttatccataaattgcgccagttcatcgtcactcaatgctttactgtgaacaatcaacgcattacaacgctggcgaattaacacctcaatggcgtgacgctctttttccgcttcatgatagctattgccgattagcacgtatttctgatgctgctgagcgaccagatccaccgcttttaccagcgcgccgaaaaacgcatcagaaacgtccatcaccaccacgccaatggtgtcgctaacctgagttgccagcgcctgggcattggcgtttggccgataatccagctcactcacggctttcattactgcttcacgcgtgtcggcactgaccagcgtgctgttattgagcacccgggaaaccgttgccacagagacgccagcctgacgcgctacatcacgaatggtgatcatattcactacctgttatgagattgcagtaaatgactgcttgctggcggctattttgtcagcactgaatacaggacttcgtgaatcgagtcacagcaatggaaacggttacagccgttttgttaacgaatgtgatccagatcgttatctacttgttttagatattgccggtccggcagcacgcaaagttaactgacgccagagccattccaccggcccctggcggaagtaacgcagccagataacagagaagaggatattcgccagccataccggaataacaaacgccagcagctccaggcggtcaaaatgcataaacaaaccgaggtggtaaaaaagcgtggtacaaatcagcgtttgcaatagatagttggtcagcgccatccgtccgacgcaggcgatcgcaagcaccagcttaaagcggctcaattgcggccagaagccataaaacaggctcgcatagccaatcgcctgaaacggcgcactcagttcccgcggcatttgaagtaagaaggcacaccagcgatacgcccagtccagctgccattgcagggcgatggcaggaaggttaatggtcaccccaatcgccaccagcacaaaaccagtacgacgatagtgacgtaagctgaactgccctttcagccagccgctgcgcatcagcgccgcaccaatgagcatcatccctgccagttgccagccatactgtgcgcccagtgccagtaaactgttgccaacaccatcggcacgattactgatcgcttcaacgccgccgtgaagcttccagtatttttcatacaaaatagcgcttgcatccggcgtccaggcgcggctggtctggctgtcggaaatcagccccaataacagcaaaacgccaagccccaccagataaagcatgacgcctgtattaaacaggctttttacgcttggcgcatcgcgcaccagccgccagcagattaagcccaccagcccgtaagccagcaaaatatcgccgtcccagaacaataaaccgtgaataaagcccaacaagactaacagcgttaaccggctctggatccagcgtctgccacggggcagcaacatttgcaggcccgcaccaaacagtagcgcaaaaagcgtgaggaatttcacctggccgatgagatcaagaaatgcccaagtccatgcatcccgcggcgtaatagcaccgtaccaggcgggattgagataagccgcctttggtagcccaaaggcgctgatgtttaatagcaggatccccagaatggcgacgccgcgaacaaaatcgagcgtgacgttgcgctccatggttcctgccttttaatcagttgtgatgacgcacagcgcgcagaaactcgtggcgcgtattctgactggatttgaacaatccaccaagagaggtcgttgtcgtggcactggttgcatcgcggatgccacgcgccttcacgcagtaatgcaccgcgtcgatgctgacagccacgttattggtgcccagcagcgtttgtagcgcaataagaatttgctgcgtcagacgttcctgcacctgcggacgctgggcaaagaactgcacaatgcggttaattttactcagaccgatcacgctatctttcgggatataggccaccgtcgctttgccatcgatggtaacaaaatggtgttcacaggtgctggtcagagtgatatcgcgcacggtgaccatttcatcgaccttcattttgttttcaatgagggtgattttcgggaaattggcgtaatccagaccggagaaaatttcatcgacatacattttagcgatgcgatgcggcgtttccatcaaactgtcatcagccaggtcgagattcagcagctgcatgatttcggtcatatgaccagcaataaggcttttgcgcgtttcgttatccatttcatgcacgggcgggcgcagcggtgtttccagtcctcgcgcaactaacgcttcatgaaccagggccgcttctttactgagacttggcatttatgatttctcctgcaggtgtgacgcctccgccctgcgtgggggcaaagttattaagctgatttacagcctgattattgtgcgtgaggcggcgcacataatccagtattcacagcgataattattgtaattgccgctgcctttcatcagcagatgttaaaacatcgttatgcaaatacggaagtgaaagttactcacagcacattgaataaacggtatgatgaagaaattgcaaacaacacaacaaggagccacgcatggaaatgctcgaagagcaccgctgttttgaaggctggcagcaacgctggcgacacgactccagtaccttaaactgcccgatgacgttcagtatctttctccctccacctcgtgatcacactccgccaccagtgctgtactggctttccggattaacctgcaatgacgagaacttcaccaccaaggcgggtgcccagcgggtagcggcggaactggggattgtactggtgatgccagacaccagcccgcgcggcgaaaaggttgccaacgacgatggctacgatttaggccagggcgcaggcttttatcttaatgccacgcaaccgccgtgggcgacgcattaccggatgtatgattatctgcgcgatgaattaccggcgctggttcagagccaatttaatgtcagcgaccgctgcgccattagcggtcacagtatgggtggtcacggtgcgctgattatggcgctgaaaaatccgggtaaatacaccagcgttagcgcctttgcgccaattgtgaatccgtgcagcgtcccgtggggaatcaaagcgtttagcagctatttaggtgaggacaaaaatgcatggctggaatgggacagttgcgcactgatgtatgccagtaacgcgcaggatgcgatcccgacgcttatcgatcagggcgataatgatcagtttcttgccgaccagttgcaacctgcggtactggcagaagccgcgcgccagaaagcgtggccgatgacgctgcgtattcagccgggatatgatcacagttactacttcatcgcctcttttatagaggatcacctgcgcttccatgcgcagtatttactgaagtgaaagtccgcccggttcgccgggcatcttctcatcagaagcgataatccactgccataaagtaacgacgtccgtcttcgttatagctgtagtcgtcacgactgagatccttgtcgccaaggttcagcacgcctgcgcgcagtttgacgtctttagtcacctgccaggccgcgccggtattccagatggtataaccgcccggtgttttagccgtcgcgctgtcggcgcgtttctgcccggtatagtgcccagaaacatagaaactccagtcttccagcgccagcggtttccagtccagcgtaccgttagcagtatggaacggcagatcggatagcggtttgttttcgccgttgctgacatcacgaccatcgttgtaggtgtagttgatgctcagtttccattcatcgttgaacggaattttcagttcggtttccacgccctgaatacgagctttgttaacgttgtagtagctaaataccggtatgcgccgtccgttagcgcccgtctcaaaaccaacaaagttttggtagcccggtgcagcgttgacgtcagacgtacggctgatgctgatacgatctttcacatcgttacggaaaacggtaacgctggattcaaccccttccagccagccttcttcacccatgtagtaaagccccagctcccaactttcgctggtttctggtttcagatccgggctacccacaatcttacatgcgccacggcaggaattgctcgtccagtcagggctaagttgcaacagagaaggtgctttaaatgccgtcgcccagccccctttcaccgttacggtgtcggtggcgttataaaccaggtaggcacgcggactccagtgttcaccgtaggtttcgtgatcgtccatacgcacgccggtcgtcagcgccagcggctcgaagatccgccattcatcttccacaaacagcgcgtactggctggcagacgttttggagctggttcccccggtcaggttcaccgcatcgctaagtttgtcgtgacgccattcaccgccaaccgtgagaaactgattaatcgccgtcagcggcaacgtgtatttgccgtcgaccgtattgctttcggaagttatcgggctgctgttgccagggtttttgttctcgactttctcaccgtagtatttcagttcgctggtgccgtaatcccaacgcccattatggctgacggagtagttctggcgttccaggcggtttttgtccaggctgtcggaatcacgatcctgacggtcgaaaccgtatccggcagtaaaatcgtgattttgattcggtgtccaggcaaattcgacattgccgtcgcggctggagaatccttcaatacgcggcgtttctccggtatcggtggtcgtactgttttgcgggtcatccttttcacgttttgccaggctgccgtaagctttcattcccagcacaccatcaattaatggtccactggtaaagaactgaccgttataggtgtcaccgcgatcgcgatgttcctgaatggtggtatcgacggtaacggtaccgctccatttctgaccgatttttttggtgatgatattcactacaccgccgagcgcatcggaaccgtacaggctgctcatcgggccacggaccacttcaatacgttcgatggaatcgaccgggatccagttcagatcgaaatcattgtggcggaagacggcattgcgggagttcacgcgtttaccgtcgacgagaatcagggtatagctgctgtccagaccacgaatactaacgcccttacggttatccccttcgttcgtcagttgtacgccaggcacttctttgaggacatccttcagattctgtaccggttttcgctgcaggtcttcctgggtaatgacgctgatactggcaggtgcatctttaagattttgttccacggaagatgcagtgacaaccatcgtttcgccatcatcatcgaccgctaacacaggccatgcacaagaaatagcggacaaacacagcccgacccgtacgaaagggttcaacctaaacattccatatctccatgaggtaactacgaaaataaaatgggttatcgctcacatcttcttcacgtccccttgcgtacggcagcatcgcggtggacttattttttatgcaggtgatcatcccagaaagccggaacagcctctgatttgtcagccttttttgattgcggcgtaacgataatgcaaacgataacaattatcaatccaaatgttaaattttatatccgcatgatttgtcagggaaatggaattgaaaaagccctctcggttgagagggcttagcaaggaagggaggaaacttatttcttatcgttctgcgggaacttcatttcgctgtagcgtacgaagtgagttcctttaatcagcttgtagccgaaccaaataatcaggaacagcgggataccaatatacgttgccgctacgccgccccagtcaatagtatctttcaggaacgcttcgtagttctggcccaaagtgataatcagacacagaatgaatgcgaagatcggccccagtgggaagaaaccactacggtacggcagatcgttaatgtcgtgtccctgcaatacgtaaccgcgacggaagcgatagtggctaatggcaatccccagccaggcgataaaacccgtcatcccggaggtgttcagcagccacaggtataccgtctggttgccaaacatggaggtcaggaagcacagaccggcaatcaccgtcgtcgcatacagcgcattacgcggcacgccaccacggctcagtttagcgaaaatgcgcggcgctttaccgtcacacgccagggtgtacagcatacgagtagacgcatacataccggagttacccgcactcagcaccgccgtcagaataactgcgttcatcaccgccgccgcagagagcagacccgcgtgctggaacaccagggtgaacggactaacgctgatgtctttaacatcgttacgcagcaggctcggatcggtgtacggaataatcaggctgataatcaggatcgcgaacacatagaacaacaggattcgccagaacacctgacgtaccgcgcgtggaatgtttttcgccggatcttcggactcgcctgcagcaataccgatcagctcggttccctggaaagagaagccgacaatcatagctacgccgatcatcgccgcaaaaccaccagcaaacggcgcttcgccgattgtccagttgctccagcccgcaggctgcgcgcctttgaagataccgataatcatcagcacgccaacgatgataaagacaataactgtcgtgactttgatcagactgaaccagtattccgcttcaccaaagccacgaacactgatgtagttcagcaggaagataacgccgaggaacaacgcactccagatccagcccggtgtatccgggaaccaccagctcatgaccagctgagctgcaaccaggtcaacggcgatagtcaccgcccagttgtaccagtagttccagcccagcgcgaagccaaagccttcttcaacatagttctgaccgtaagtggcaaagctaccggaaaccggcatatatgcagccagttcaccgagactggtcatcaggaagtaaaccatcaggccaatcagcatatagctgagcaatgccccgcccggacctgcctgagaaatcgttgcgccagaggcaacaaaaagacctgtaccgatggaaccgccaatggcaatcatcgtcaggtgacgcgcctttaattcacggcgtaagcccggcgcttctgtggttttagtttcggaaaccatacaaaaatgctatccatcttaaaaatgaggcgcgattgtagcagacgattggcaatccttccggcagaaatacacggttataagacaccttcatgatcgcccagggattataagtaaagcagccaatctcttttctggcgaatgcatgctgaaggcgctgcgtcacgaaatcgacacagcaccagcatgttcttgtacagcaacttaacgcggcacatttgcgggatcgcaatagtccagaaagcgccgtagcgcgttggaaaggtgtttttgccgatgatgtatacgccacaacgtacgcatcaggcgcggcagagggaccgcaacttcacttaatgtgcctgcctgcaattgatcttcaatcacacgtcggctcaggcaactaattcccaacccatgacgcaccgcatgtttgattgcctcggagttacctaattccatcgccatctcaaacttcggtaaatgactcagcaacagataatcgacaatctcccgcgtgccggaaccgcgttcacgcaggatccacggcgcagcggccagctgttctaaggtgaccggaccacgggccaacgggctagtcggcgcggcgaaaaccaccagctcgtcttccagccacggttcagaaatgatttcagtgctgtggcacggtccttcaataaagccaatatcaacgcggaaatccagcaccgcttgcatcacgtcctggctattcccaacgctaagttcaatcggcaactgcggataatcatggcgataacgggcgataactgcaggcagaatgtagttaccgatggtactactggcatagatacgaatcgcgccgttgtcttcgcgaaacagttgttcgatttcaaccgcctgttcaagcaatgccaacgcacgcggatagagcagccgcccgtgttcattaacaaccagtcttttccccacgcgatcaaacagttgcacgccaagctgcccttccaggtcggtcaaggctgcgctcactgcactttggctcaacgccagcatcacgctcgcctgggtggtacttccacttttcaatacttctgcaaaaacttccaactgccggagggtgatgtgcatagtcgcttaccacttataaagattaattataaatatataatcaattttatttttaaaccagttagtcgtaaccttatgcccggttaaaggagagggttatgacgaatatcaccttacagaaacaacatcgtacactgtggcattttattccggggttagccctgagtgcagttatcaccggggtcgccctgtggggtggttccattcccgcggttgcgggtgccgggtttagtgccctcaccctcgcaatcttgttggggatggttttaggcaacaccatctatccgcacatctggaaaagctgtgacggtggtgtgctgtttgccaagcaatatttattacgtctgggtatcattctttatggcttccgtctgacgttcagccaaattgccgatgtcggtatcagtgggatcatcattgacgtgttgacgctgtccagtaccttcctgctggcttgcttcctggggcagaaagtgtttggtctggataagcacaccagctggttgatcggtgccggtagcagtatctgtggtgctgccgcggtactggcgactgagccggtagtgaaagcggaagccagtaaagtaaccgtggctgttgcaaccgttgttatcttcgggaccgtcgcgattttcctctacccggcgatatatccgctgatgtctcaatggtttagtccggaaactttcggtatctacattggttctactgtgcacgaagtggcgcaggtggtggcggcaggtcatgccatcagcccggatgcggaaaacgcagcagttatttccaaaatgctgcgcgtgatgatgctggctccgttcctcatcctgctggcggcgcgtgttaaacagctgtctggggcgaacagcggcgagaaaagcaaaatcactattccgtggtttgccatcttgttcatcgtagttgccatctttaacagcttccacctgttaccgcagagcgtggtgaacatgctggtaacgctggataccttcctgctggcaatggcgatggcggcgctgggtctgaccactcacgtcagcgcgctgaaaaaagctggggcgaaacctctgctgatggcactggtactgtttgcctggctgattgttggtggtggtgcgattaactatgtgattcaaagcgtcatcgcataaaccactacatcttgctcctgttaacccgctatcattaccgttttcctccagcgggtttaacaggagtcctcgcatgaaatacattggagcgcacgttagtgctgctggcggtctggcaaatgccgcaattcgcgccgccgaaatcgacgcaaccgcgtttgccttgttcaccaaaaaccaacgtcagtggcgtgccgcaccgctcacgacgcaaaccatcgatgaattcaaagccgcctgtgaaaaatatcactacacaagcgcgcaaattcttccccacgacagttatctgattaacctcggacatccggtcactgaagctctggaaaaaagccgcgatgcctttatagatgaaatgcagcgttgcgaacagctggggctttctttgctcaacttccaccctggcagccatctgatgcagattagtgaagaggattgccttgcgcgtattgccgaatccatcaacattgcgctggataaaactcaaggtgtgacagcggtgatagaaaacaccgccggtcagggcagtaacttagggtttaaattcgaacatctcgcggcgattatcgacggcgtggaagataaatcccgcgtcggcgtctgcattgatacctgccatgctttcgctgccgggtatgatttgcgtactccagccgaatgcgagaaaacattcgcggattttgcccgtactgtcggctttaagtatctgcgcgggatgcaccttaacgatgcgaaaagcacctttggcagccgcgttgaccgccatcatagcctcggtgaaggcaatatcggtcatgatgcgttccgctggatcatgcaggacgaccgtttcgacggcattccgctgatcctcgaaaccatcaacccggatatctgggcagaagagatcgcctggctgaaagcgcaacaaactgaaaaagcggtagcctgaagatgaataaccgggaaaaggagatccttgcaattttacggcgtaacccgctgattcagcagaacgaaattgcggacatgctgcaaatcagccgtagccgcgttgcggcgcatattatggatttaatgcgcaaaggccggattaaaggcaaaggttacattctcaccgagcaggaatactgcgtagtggtggggacaatcaatatggatattcgcgggatggcggatatccgttacccgcaaagcgcttctcatcccggtacaattcattgcagtgcgggcggcgtgggacgcaacatcgcccacaatctggcgctgttaggccgtgacgtccatttgcttagtgtgattggcgatgacttttatggcgaaatgctcctggaagaaacgcgccgtgccggcgtgaatgtctccggctgcgttcgtttgcatggtcaaagcacaagcacgtatctggcaattgccaatcgagacgatcaaaccgtgctggcgattaacgatacccatctgctggaacagttgacaccgcaactactgaacgggagccgcgatttacttcgtcatgcgggcgtggtactggctgattgcaacctgacagccgaggcgctggaatgggtctttaccctcgctgatgaaatcccggtgtttgtcgataccgttagtgaattcaaagcgggcaaaatcaaacactggctggcgcatattcacaccctgaaacccactttaccggagctggaaattttatggggacaggcgatcaccagcgatgctgaccgtaataccgcagtgaatgcattgcatcagcaaggtgttcagcaactgtttgtttatttgcccgatgagagtgtttattgcagcgaaaaggatggagaacaatttttgctgaccgcgccagcgcatacgacagtagacagttttggtgctgacgatggttttatggcgggcctggtatatagctttcttgaaggatacagtttccgcgacagcgcccgttttgcggtagcctgcgcggcaattagccgcgccagcggcagcttaaacaaccctaccctgtctgccgataacgcgcttagtttagtgccaatggtgtaacaatgttgccggatgcgacgcttaacgcgtcttatccggcctacaaatcaggcaatttcagcaagtaaatgtaggcctgataagcttgcgcatcaggcaatgacactcaagctaaaccaataaagaacccggcaatggtcgcactcatcaagttggaaagcgtcgccgccgccagcgcccgtaaaccaagctgggcgatttccggcgcacggtgtggcgcaaccgcagaaaacgcccccaccaccaccccgatagaaccaaagttagcgaaaccgcacaacgcgaaggaaataatcgccacagttttagcatcgagagtgccagccgtttgcagatagggactgaaattgagataagcgacaaattcatttattgccagtttctgtccaatcaaactcccggcaagattcgcatcactccagtccacacccatcacccacgccagtggagccagcaggtaacctaaaatggactccaggctggcatgttcaaaaccaaaccagccaccaacgccgccgataataccgttaatcaacgcaattattgcaacaaatgccatcaccactgttgccacacctgcggcgattttcagcccggtcattgcccctgtcgcagcggcttcaataatgctttttggcggtgtttcggtgaaagagaggttattaaaggaaacctggctagattccgttgccgggcttaacaggcgggcaaacaagatcccgccagggatcgccattaaacttgccgccagcagatattccacaggcacgcccagtgcggcgtaaccaatcattgtgctaccagcaatgctggccatgccactacaaatcgctgtaaataattcattgcgattcagacgatcgataaagggtttgacgattgccggaatttcgttttgcccgaggaaaatggtggtgaccgcgacgaaactctcgatcttgctgatatttaatgctttctggaagataccgccgagaattcgaattaaaatccccatcacaccgatgtagtagagaatactcaccagcgcggtgacgaagataattgccggtaacaccctgaaaccaaagataaatcctgcaccatcaaataaggtatccattttcggtccgaccagagaaccgaagataaatgcgctacccgcgtcgctgtacgccatcactttatgcacgccaaaagcgactttttcagcgacccaacgccctggcggtaaccaaagcataatgccgccaatcacgacctgtaacactaacgccgcgccaacggtacgcaggctgatcttcttcttgtttacactcagtaaaaacgcaatcgtcagcaataccaccattcccagaacacttctcatgacatccatagtgattatctcttcatgtcatattgggcgacggctttctgcccatcagaaatagccaggcctgcatcttgcgataccggcccggcttgttatcaacacttaatgggttttgatgtagccgcgcacgcactcttcgactaatccccagaaccagtctgtatcaatagtgatgccgactttggtattggcgggcttgccaagaacgcccagctcgtcgcagacggtacgcccatagcaagggccactgttgacgtccacttcgacgtacatctcctgggttttaatgccatcagggttaatcagataaccgatgcaggtggcgtcgtgcaccgggccgccagcaaggccgtagttttcgaactgcgttttgagagtgaagttcatgatgtcgctgaacagctctccggcggggccgcctgccctttccatccgagcaatcacgtccggggtgcaaacggtctggttggtgagatcgaggcccatcatcactaatggaacgccggaggtgaacactacgcgtgcggcttccgggtcggcaaagatgttgaactcggcagatggcgtgaagttgcctgtaccgtaagcgccgcccattagcacaatttcacggattttgggcaggatcgcgggttgcatacgcattgccaccgcgatattactaagcggaccaaccggcaccagagtgatatcgccatcgcttgccatcagggtatcaatgatatatttcaccgcatgagtgctttctgcctggcgggtcagcggctcgaataccgggccatccagtccggtttcaccgtgaatattatcggcaacgatttgttgacgcataatgggctgcggcatccccgcataaaccggaacattaatctccagtttctggcaaacattcaggccattaattaatgttttatcaagcgtctgattacccgctacaatagtgatgcctaataaatctattgccggatgtttcgccgccatcattatagcaatagcatcatcatgacccggatcacaatccagaataatttttctcttttccattgtttatttcctctgtttccagttgcgttattttttctacagcaaagaaaattcgaccgggccgatgattgaatcttaacaacagcgtacgtatgctaaatatgagaaatctcatagcggataaacatcgtgaaagaaatccacaataatgatcttaagcagcaattgatgagtgaatccgcgtttaaggattgctttttaacggatgttagtgccgatacgcggctgtttcattttttagcgcgtgactacattgtgcaggaagggcaacagccgtcctggctgttttacctgacgcgaggccgcgccaggctttacgccacgctagctaatggtcgcgtgagcctgatcgatttctttgccgccccctgttttattggcgagattgagttaatcgataaagaccatgaaccgcgtgcggtgcaggctattgaagagtgttggtgccttgcgctccctatgaaacattaccgtccgctgttattaaacgacacgctatttttacgaaaactctgcgtcaccttaagtcataaaaattatcgtaatattgtttctttaactcagaatcaaagttttccgttagtgaatcgcctggcagcatttatattactcagccaggaaggtgatctttatcacgaaaagcatacgcaagcggcagagtatttaggcgtttcttatcgacatcttttatatgttctcgcgcagttcattcacgacggtttattaattaaaagcaagaaagggtatctcattaaaaacagaaagcagttgagtggactggcgctggagatggacccggagaataaattctccgggatgatgcagtaaaaattattttcaatagcgcgattgccggatgcaacgcttaatacgttttatccggtctacaaatcgagcattacgccagaccaataaagaacccggcaatagtcgcactcatcaggttggaaagcgttgctgctgccagcgcccgtaaaccaagctgggcgatttccggcgcgcgttttgggctaatagcgctaaatgcgccaacgacaacaccgatagaaccaaagttagcaaaaccacaaagcgcaaaggagataatcgcaatggttttcacttccagcgtgccgcccgtttgcaggtatggggagaaactcaggtaagcgacgaattcgttaatcgccagtttctgcccaatcaggctacccgcaagattggcatcactccagtccacacccatgatccacgccagcggtgccagcacatagccaaaaatactttccagagaggcattggcgaaaccaaaccagccgccaattccgccgataatgccgttgatcagcgcaataattgcgacaaacgccattaccaccgtcgccacaccagcggcgatttttagcccggtcatcgcaccgctcgccgccgcttcgataaagctttttggcggcgtttcgctgaagctcagattttcaaatgtgacctggctaggctcggttgccgggctaagaatacgtgcaaacaaaatcccgccagggatcgccatcaggcttgccgctaacaggtagtcaattggtacgcccattccggcataaccaatcatcatgctaccagcaatggacgccatcccgctacaaattgcggtaaacaactcgttgcgattcatgcgatcgataaacggtttaacgatcgccgggatctcattttgcccgaggaaaatagtagtaaccgcaacaaaagattcgattttgctgatgttgagggctttctggaaaatgctgccaaggatgcgaatcagcagccccatcacgccaatgtagtacagcagactgatgagcgcagtaacgaaaataatcgccggaagtacgcgaaaggcgaagataaaacccgcaccgtcaaacaggacatccattttcggcccaaccaggctaccaaaaatgaaggcgctaccggcatcactgtaagacatcactttatgaacgcctaatgccgcctgttctactgcccattttcccggtgggaagtagagcatgatgccaccaatagcgatttgcagcagcagtgcggctccaaccgtgcgcaaactgatgctctttttattcacactcaacagaaatgctattgccagtaacaccaccatccccacaacacttctcattatatccataatgattttcccttcatgccggtaaacccggcgtcagcgccaggttttggtatgcttgatgagtacgggcgacggctttctgcccgtcagaaattaacccgcgagacgctgatattctttggcaatttcgctcgccagaatggcgttgttgaacaccagctggatgttggatttcaggctgtcaccgccggtcagttcagcaacgcgcgccagcaggaatggcgtactttctttaccaatgactccctgagcttcagcttcagctaccgcctgatcgatcgccgcattgatagtgtgttccggcatagcaaactgttccgggatcgggttcgctaccacgaggccaccgttcagaccgctttgccatttcaccaccattgcacgggcaatttcgctggcgctgtcgagacgaatgctgacgtcaaacgggctggtgcggcagaaaaacgcaggcagcgctttagtctgatagccaattaacggcacaccgaaggtttctaaatactcagtggttaatcctaaatcgagaatagatttcgccccggcacaaacaacggtgacattagtatttgccagttcttgcaaatcggcagaaatatcgaaggtatgttccgccccgcgatgcacaccaccaattcccccggtggcaaatactttaattccggcaagcgccgcaataatcatcgtactagccacagtggttgcgccattttttccggcggcaacaacaaaaggtaaatcgcgacgactaactttggtcacgttatgcccttcacgacccagtaattcaatttcttctttgcttaaccccactttcatcacgccgccaataatggcgatcgtggcaggtacagcgccctgtttacgaatagtttcttcaacttcaattgcggtctgggcattttgtgggaacggcatcccgtgagaaataatggtgctttccagcgccacaaccggttttttgttttttaaagcgtcctgcacttccggggaaatttgtaataattcaggggaaatttttaattcagacattctgcgttctccactaagcttataacgttggcaatgcttaaatcggggttattggtgtattcacaggagagcgccatactgctacatccctgtgcgaaacgaacagattcggcaaacggcattccgtctacccaacagctagcaagtcccgccatcatggcatcgcccgctccggtaacattaataacattggttttgatcggcgcagaccagccactttcaccgctgatatcgctgtaataaacgccgtcgccgcccatgctcaataccagtcggttcaggccatgttgatggaaccaggcagcaacttttgccacatcttcacgcccactcagcgcaatcccactcagggtttccgcttcaaggcggtttggcttgagagtgtggatctgatttagacggtcgcgcactttgacacatttccatgcgctaaccggatcgacaaatacgggtacgttggcggcattatccagaatccatgccagtgcctcttcactgatattacagtccgcgacaatgacctttgccctctgaataaattcaccgtgctgtgcgagatattcagctgtaatagcgttgctaatattcatgtcatttatagcaaccagcatttcaccggtattatcgagtaaacttaaataactgctcgtattttctcccggcacaatcaggcatttatcgacataaacgccagattgattggtttgcgttagcaggctttgaccataaaaatcactgcctacggcgctcagtagccaggctttgttacccagcaacgccaggttttgtgcaatattgcgccctactccaccaggcgtaaattttattttacctggattactatccgcataatttaaactttcatgactatatccggcgacatcaatattcgcgctacctataattacgacataatccttttcgcgcatagcacgtcctctggtaaaaaattaccaaccctgtcaatccacaagaatatagatactgcaaagacggtttaaacatgtgttcatatttaaacatgtgctcatagtatgcatgttttacgtaaagtaaattaccgccagagaggcaaaatgggcagatttgagcaggctcacaaaatgcgattaaatgcctgaattacaaaagcgaggaatttgtgacgggatgcacagaacagaacaataaaaaagggcagaaaataatctgcccttgaggaaataacctgagtgtttgatgaacgtttgaagtttctactgaaagataaaaccatttaaattcataaaattacattcacaaaccggtcattctctttgcgctcatcaaatgttacaggacaggaaatttctgccctgtaacacaccttttattacgctgctttcgctactgcgtccacttccggacgtttcaggaaggcataggccaaacccgccaccagcgtaccggcaataattgctaccaggtaacccaataccggcgtaatagcgccagggatcagcagaacaaacagaccaccgtgcggtgccatcagtttcgcaccaatcgccatactgattgcgccagtcagcgccccacccacgatacagcacggcagcacacgcatcggatcacgagcagcaaacggaattgcaccttcgctaatgaagcacagtcccaataccagagcggctttgccaccttcctgctgcgctttgtcgaatttgcgacgcgccaccattgttgccagacccattgccagcggtggcaccatacctgccgccataatcgccgccatcgggccataggtttgagtactcagcagacccacaccgaatgcgtacgctgctttgtttaccggaccgcccatgtcagtacacatcatgccaccgaggatcgcccccagcagaaccgcattcgcagtccccatggtctgcagccagtgagtcagcccttcgagaatgccagcaactggtttaccgatcaggtagatcatcgccagaccgaccaccagactggaaattagcggaatgatcaggatcggtttcagcgcctccatactctgtggcagtttcaattgcgtactgattaacttcgcaatgtaaccagccaggaagcccgcaataataccaccaatgaagccagaaccggtgctgaccgccagcataccgccaatcagacccggagtgaggcccggacgatcggcaatggaaaaggcaatataacctgccagtaccggcaccatcagcgcaaaggcactaccaccaccaatctgcatcagcgccgcagccaacgtacccggctctttaaacgcttcgataccaaaagcaaaagaaagcgcgatacacagaccacctgcaacgaccatcggcagcatgtaagaaacgcccgtcagcaagtgacggtatgcgcctgcactctctttcttactttcagtggtcgccgtttgagctttgcccgccggttcatacggcgttgcttcagcaaccgctttatccagttcctgcgcggttttcttcagcgccagaccggtagaggtacgatacatcggtttaccagcaaatttcgccagatccacttcgatatctgccgccacaatcaccagatccgctgctgcgacttcttcgggagtgattgcattacccgcgccaacagaaccacgggtttcaactttcacccaccagccacgttttttcgcttcggtttcaatggcttcagccgccataaaggtgtgtgctacgccagtcgggcaagcagtcaccgcaactacgcgtttcggaccgctggcggcaactggtgctgtcgcagcgaccggcgcagtgtaaggtttcgcatggcctttggcttcactcaggaacagctcagggtgcgcaactgcccgggaaatatcgcccagccagacatttttaccgttcagcgcgctgtcgttcgggatggaatcaccgagaacaatcgccatttcagcgtcgttcggattgtcgatgatttccagttttgcttttcgcgccgccgcgcccagcagggtcttcgccatataggcgcgtgcctgaccgagattagcgtcaataatcagcagcgttttcattatgcctctcctgctgtcagttaaaaggttgtaagtcgacgcgcgccatcattgcggccaactgcggacgatcggtaatacccacattgctttgacttaccgccagggctgcaacagctgtcgccagacgcagtgtgtgttcactggattcacgcatcagcaagccataaatcaggccaccaaccatagaatcccctgcgccaacggtgcttacgacatcgacactcggtggtttggcgatccattcgccggaggcattaacccaaagcgcgccttcggcacccagactaataacaacatgcgcgatgccttgttcacgtagcgcatgtgcagcttcaatcacatctttcatttcaggcagtttacggcctgcccagatttccagctcgcggcggttaggtttcaccagccacggtgccgctttcaaacctgctactaacgcttcacggctactatcaaagataatgcaaggacactgactacgcaggcgagtcatccagtcggtgaacgcttccgggctgacgccactcggtaagcttccgctgacacagaccatatcgaactgaccgagccagctcagagaatcagtcacaaagcgttcccagtcggcgggggtgacttcaaaaccgctgaagttgaagtcggtcacttcgccgtctttttccgtcagcttaacgttaattcgggtgcgcccctgtacaacctggaaacggttggcaatgcccagctcgctgaacagttgctgaaaaccatcctgattgtctttacccaggaagccgccaacggtgacatcaattcccaggtcttttaatactttggccacgttgatgcctttacccgccgcatgcagaccggtggttttcaccaggttcacttcgccgcgttcaatttccgggcagaaaccaacaaggtcataagccggattaagggtgatagtagcaacacgtctgctcattatgcgccctccccaagaccagcagcgatagcgtcgccgattgctttcagcgcctgttcagcatctgcaccctgggcggtaaagcgtaggcgatgacctttcttaacgccaagtgccacaactttcatcagactacgtccgtttgccggtttgccggtaccatcaaggtttgtcacggtaatatcactgttaaattgtttaatggtattgaccagcatggtacctggacgagcatgcaggccgtgttcattgcgcaccacaaactccgcgcttaacacgtcgtcggtcggcgcatcatcgctggtcagcagcgccagcaacgttgccgcatccgctttcagcaagcggtcagctttattgtcgagcaataaatcagcgagacgcttaagaaccgcgatgggctgatcgtcattcatcgccacactcaccagcatggctgccgtttcgccgtccacatcaaaagcatttgccgcacggcttaccgcaatcgcgctacgcagattgccttcggcgctatcgctcagccagataccctgtccgagattcagcggttgttcattgatggctttggtgacgaaagtggcgtcaactgcccccgcctctttcagacgcgcagcgttcagcgcctgaagagtcagcagatcgctggcgacgatatccagtgtcagcatttcgttgtcgagcttcagctgctcactctgcttttcgcccatcagtaatgcgcgaagttcttctgctgttgttgcactcttcagttgttcagcaacggaatcatcgctcagtacgtgggtcagctggcgtagcaggcccagatgttcatcgctgctggcagcaataccgattgccacgtacgctacctgaccgtcaccccaggtgacgccttccgggaactgaaatacctgaacgccggttttcagcacctgatcgcgggtgtcggtagtgccgtgtggaatagcaataccattgccgaggaacgtactggtttgctgttcgcgcgccagcatgccattgacgtagccttctgctacattaccggcctgcaccagcgccgcagcgacctggcgaatcgcctcttctttgtctccggccttttcgcccggatggatgtcctgtacggataactggaacatagttctcctctcttgctgaattgaaacgattcagcctctatgagaaaaaaagcgccaacctggcttagggttaaagacaagatcgcgctgaaacgtttcaagaaagcataatacttctgtttcagcacgcaaggaaagccgtaaagttatgagcaaaagtttgatgtgctgcacaattttttgccatttttcctaattgctgatgggaaaatccgttatcagcaatttcatttcagcagcgtcagcagccaatcagcaacagtgaaatggcattttgactattcgtggcgcttttgatttcgctgtctgtttattttctgacaagcagcgtaaactccgcgtcttcctcttccagtgatcgaccagcatgcataactcccccgcagtctccagcgcgaaaagctttgacctgaccagcacggcgtttttaatcgttgcctttctcaccggtattgcgggcgctctgcaaaccccgacactcagtatttttcttaccgatgaagtacatgcccgtccggcgatggtgggattcttctttaccggcagcgctgtcattgggattctggtaagtcagtttctcgccgggcgctctgataagcgcggcgatcgcaaaagcctgattgtcttttgctgcctgttaggcgtgctggcctgcaccctttttgcctggaatcgcaactactttgttttgctattcgttggcgtctttcttagcagctttggcagcaccgctaacccgcaaatgtttgcccttgcccgtgaacatgccgacaaaaccggacgtgaggcggtgatgttcagctcttttttacgcgctcaggttagtctggcatgggtcattggcccaccgctggcttatgccttagcgatgggtttcagctttacggtaatgtatctgagcgcagcggtagcgtttattgtttgcggtgtgatggtgtggctgtttttaccgagcatgcgaaaagagcttccgctggcgaccggcacgatcgaagcgccgcgccgtaaccgtcgcgatacgctgctgctgtttgtcatttgtacattgatgtggggcagcaacagcctgtacatcatcaacatgccgctatttattatcaacgaactgcatcttcccgagaaactggccggtgtgatgatggggaccgccgccgggctggaaatcccgacgatgttgattgccggatatttcgccaaacgtctgggtaagcgtttcttaatgcgcgttgctgccgtgggtggcgtctgtttttacgcaggaatgctgatggcgcatagtcctgtcattctgttgggcttgcagctgctaaatgctatttttattggcattctgggcggcatcgggatgctctattttcaggatctgatgcccggtcaggcgggtagtgccaccacgctctataccaacactagccgcgtgggctggatcatcgcaggaagtgtggcgggcatcgtcgccgagatctggaattatcacgctgtgttctggtttgcgatggtgatgattatcgccactctgttttgcttactgcggattaaagatgtttaaggcgcggtcagcatttccagatcgataagccaggtcatggcctgctgacggctgttaccgcacatttcagcgctggcttgtaagcctgcacagactttcggtcgcagtgggctggtgaaaattttacagcgttgctgttcatcaagctgaatgcagggcgtattggcgggcttgccatctggcataccgggaatagggctggaaatactaggggcagtgcaacacgccccgcaacccggacggcattccatacgttgttctcttaaggttaaccaccggattgatgagcgcgcacagtaccaccttttttgcaccagcaaaagtgcgaataccacttgcccgaaaggcccgtcgcgagtactttgtcgcgatatttttgacattttcgactacaggaatttttcgatgccaagagcgaacgaaattaaaaaaggtatggtactgaattacaacggcaaactgctgctggttaaggatattgatattcagagccccactgcccgcggtgccgctacgctgtacaaaatgcgtttttctgatgtccgtaccgggctgaaagtagaagagcgtttcaaaggtgatgatatcgttgacaccgtgacgctgacccgccgttacgttgacttctcctatgtcgatggcaacgaatatgtctttatggataaagaagactataccccgtataccttcaccaaagatcagattgaagaagagttgctgtttatgccagagggcggcatgccggacatgcaggtgctgacctgggacggtcaactgctggcgcttgagctgccgcagaccgttgatctggaaatcgttgaaaccgcaccaggcatcaaaggggcatctgccagcgcccgtaacaaaccggcgacattgagcactggtctggtgattcaggtaccagaatacttaagcccgggcgaaaaaattcgtatccatatcgaagaacgccgttatatggggcgtgctgactaacttcagccgcatgcagaaaagggatagctcaggctgtcccttttttaatttattataccaatcttctattttgcgcttcctgaacaccttacgccctcaattttcactcgttgattgatcgccctcacacttcatcgcattaacaatccagaccaatttcaattgctgtcatataactttacactgtcgttgttaattaatcgttactaagacgtgactcctatgaatacaatcgcctccgttacgctcccgcatcatgtacacgctccacgctatgatcgccagcagttgcaaagtcgtatcgttcattttggctttggagcctttcaccgcgctcatcaggcgttactgaccgatcgtgtgctgaatgcccagggcggcgactgggggatctgtgaaatcagcttgttcagcggtgatcaactgatgagccagctccgcgcacagaaccatttatataccgtgctggagaaaggtgcggacggcaatcaggtgataattgtcggtgccgttcacgaatgccttaatgcaaaactggattccttagcggcaattattgagaaattttgcgagccacaggtggcaattgtttccctgacgattaccgaaaaaggctattgtattgacccggccaccggtgcactcgacaccagtaatccgcggattattcacgatctacaaacccctgaagaacctcactccgcaccgggtattctcgtcgaagcactgaaacgccgccgtgagcgcggccttacaccgtttaccgtgctctcctgcgacaatattcccgacaatggtcatgtggtgaaaaacgcggtgctgggaatggcagaaaaacgtagcccagaactcgccgggtggataaaagagcacgtcagttttccgggaaccatggtcgaccgcattgttccggctgcaaccgacgaaagtctggtggaaatcagccagcatctgggggtgaatgatccctgcgcgattagctgcgaaccgtttatccagtgggtggtggaagataacttcgtcgctgggcgtcctgcctgggaagtcgcaggtgtacaaatggtgaatgatgtcctgccatgggaagagatgaaactgcggatgcttaatggcagccactcttttctcgcttatctgggttacctcagtggattcgcccatatcagtgattgcatgcaggatcgcgcatttcgccatgccgccagaacattaatgctggatgagcaagcgccgacactgcaaattaaagatgtcgatttaacacaatatgcggataagttaattgcacgttttgctaatccggcgctgaaacataagacctggcaaatcgcgatggatggcagccagaaattaccgcaacgcatgctggcaggtattcgcatacatcaggggcgcgaaacggactggagcttgctggcattaggcgttgcaggctggatgcgttacgtcagcggcgttgatgatgccggaaatgccattgatgttcgcgatccgcttagcgataaaattcgcgaacttgttgcgggcagcagcagtgaacaacgcgtaaccgccctgctttccctgcgtgaagttttcggtgatgatctgccagataacccgcattttgtgcaggccatcgaacaagcctggcaacaaatcgtacaattcggcgcacatcaggcgctattaaacaccctcaaaatttaacgatttctgcggttaaagcggatgaagctcaccttcgtccgctctccccttctcttttctgccttttttagccaggattaacgctcagttaacttaccagagtattgcggagccgttgtgaccaggaccaacctcatcaccggttttctcggcagcgggaaaaccacgagcattcttcatctgttagcccataaagatcccaacgaaaaatgggcggtactggttaatgaatttggggaagtcggaattgatggtgctttgctcgccgatagcggcgcattgctgaaagagatccccggcggctgcatgtgctgcgttaatggtttacccatgcaggtagggttgaataccttactgcgtcagggaaaaccagaccgcttgttgatagagccgaccgggctgggccatccgaaacagatcctcgatctgttaaccgcaccagtctatgaaccgtggatagatctgcgcgccaccttgtgcattctcgatccgcgcttgctgctggacgaaaaaagcgccagcaatgaaaacttccgtgaccagctggctgccgcagacatcattgtcgccaataaatccgaccgtacgacgcccgaaagtgagcaagcgctacagcgttggtggcagcaaaatggtggcgatcgacaattaattcacagtgagcatgggaaagttgacggtcatcttctggatttgccgcgtcgcaatttagccgagttgcccgccagcgccgcgcattctcatcagcatgtcgtgaaaaaagggttagcagcgttaagcctgccagagcatcaacgctggcgtcgcagtctgaacagcgggcaaggatatcaggcctgcggctggatattcgacgctgatacggtattcgacaccattggcattctggaatgggcgcgacttgcaccggtggaacgcgtcaaaggcgtgctgcgtattcccgaagggctggtgcgaatcaaccgtcagggcgatgacctgcacattgaaacgcaaaacgttgcgccaccggacagccgtattgagctgatttccagcagcgaagctgactggaatgccttgcagagcgcgctgttgaagcttcgtttagcgactaccgcgtaaggttgcctgcgtttttcagtaagataattagagaaaatatgattaaaaatttgccgcaaatagtgttgttgaatattgtcggcctcgcgctgtttctttcctggtatatccccgttaatcatggattctggttgccgattgatgcggatattttttatttctttaatcagaaactggtcgaaagtaaggcctttttgtggctggttgcattgaccaacaatcgcgccttcgacggttgtagtctgctggcgatgggtatgttgatgctgagtttctggctgaaagaaaacgcccctggcagacgacgtatcgtgattattggtctggtcatgctattaactgcagtggtattaaaccagctgggtcaggcattaattcctgtaaaacgggccagcccaacattgacttttaccgatattaaccgcgtcagcgaactgctctctgttcccacgaaagatgccagtcgagatagctttcccggcgatcacggcatgatgctgcttatttttagcgcattcatgtggcgttatttcggcaaagttgcaggccttatcgcccttattatttttgtggtttttgcatttcccagagtaatgattggcgcacactggtttactgacatcattgtcggtagcatgaccgtgatattgatcggtttgccctgggtgttgctgacgccattaagtgatcgattaatcaccttttttgacaaaagtctaccaggaaaaaacaaacatttccaaaacaaataactcacagtaattaacatcatcagggttatttttatagtgaggataatcctgatgatgcgcaccgtgctttcatctatcgaacgcaaaaatcattctctaagtaaatgaatggattgcatgcgtttcactcaattgtactttaattgaccaaccccgcttattaactttctgtatcactttttcttataaaaaatcatgtaaaaccgctcgccaagaccgcaccaatcgggtaatctcgaactcgttttgcctcggcggtagattatcctcacagcatataattttgtgcgttagtccacagatttggccttaaggaattgtttcaacatgcccaggtaattagtctcgtgtcgcttggcatttttttataacgatatttgtcgttaaggacttcaagggaaaacaaacaacatggtcaaatctcaaccgattttgagatatatcttgcgcgggattcccgcgattgcagtagcggttctgctttctgcatgtagtgcaaataacaccgcaaagaatatgcatcctgagacacgtgcagtgggtagtgaaacaagtagtctgcaagcttctcaggatgaatttgaaaacctggttcgtaatgtcgacgtaaaaagccgaattatggatcagtatgctgactggaaaggcgtacgttatcgtctgggcggcagcactaaaaaaggtatcgattgttctggtttcgtacagcgtacattccgtgagcaatttggcttagaacttccgcgtagcacttacgaacagcaggaaatgggtaaatctgtttcccgcagtaatttgcgtacgggtgatttagttctgttccgtgccggtagtacgggacgccatgtcggtatttatatcggcaacaatcagtttgtccatgcttccaccagcagtggtgttattatttccagcatgaatgaaccgtactggaagaagcgttacaacgaagcacgccgggttctcagccgcagctaataaaccgtttggatgcaatcccttggctatcctgacgagttaactgaaagcactgcttaggcagtgcttttttgttttcattcatcagagaaaatgatgtttccgcgtcttgatccaggctatagtccggtcattgttatcttttaaatgttgtcgtaatttcaggaaattaacggaatcatgttcatacgcgctcccaattttggacgtaagctcctgcttacctgcattgttgcaggcgtaatgattgcgatactggtgagttgccttcagtttttagtggcctggcataagcacgaagtcaaatacgacacactgattaccgacgtacaaaagtatctcgatacctattttgccgacctgaaatccactactgaccggctccagccgctgaccttagatacctgccagcaagctaaccccgaactgaccgcccgcgcagcgtttagcatgaatgtccgaacgtttgtgctggtgaaagataaaaaaacattctgtagttctgcgaccggtgagatggacattccactcaatgaattgattccggcgctcgacattaataaaaacgtcgatatggcgatcttacccggcacgccgatggtgccgaacaaacccgcaatcgtcatctggtatcgcaaccctttgctgaaaaatagcggcgtctttgccgctctgaatctcaacctgacgcctagtctcttttatagtagtcggcaggaagattacgatggcgtcgccctcattattggcaatactgcgctatctaccttttctagtcgtttgatgaacgttaacgaattaaccgacatgccagtccgtgaaactaaaattgcgggcattcctctgaccgttcggctttatgcagatgactggacatggaacgatgtgtggtacgcatttttactgggcggcatgagtggaactgtcgttggcctgctctgctattacctgatgagcgtacgtatgcgccccggcagagaaatcatgaccgccatcaagcgcgaacaattttacgtggcgtatcaaccggtggtggatacacaagctttgcgagtaacgggcctggaagtactgctacgctggcggcatcctgtcgcgggagaaattcccccggatgccttcattaactttgccgaaagccaaaagatgattgtgccgctgactcagcacctgtttgagttaattgcccgcgatgccgcagaattagaaaaagtgctgccggtaggcgtcaaatttggtattaacattgcgccggaccatctgcacagcgaaagctttaaagcagatatccagaaactgctcacttccctgcccgcacaccatttccagattgtgctggaaattaccgagcgcgatatgttgaaagagcaagaagccacacaactcttcgcctggctgcacagcgtcggcgtagaaattgctattgatgacttcggcaccgggcacagcgcgcttatctatcttgagcgttttacgctcgattatctgaaaattgaccgtggatttatcaacgccatcggtacggaaacgatcacttcccccgtacttgacgcggtgctgacgctggcgaaacgcctcaatatgctgacggttgctgaaggggtcgaaacgccggaacaggcgcgatggctaagcgaacgcggcgttaatttcatgcaaggctactggattagccgcccgttaccgctggacgattttgttcgctggctaaagaaaccgtatacgccgcagtggtaaggtgtgcttacgtcccttattattcatagtgaaagcatgccggattgcggctaatgatgagtaaaaggaaatccgttgcagatgattgtgcgcatactgctgctgtttatcgctctgttcacctttggtgtgcaggcgcaggctatcaaggaaagctatgcctttgccgtgctgggcgaaccccggtacgcgtttaatttcaaccattttgattatgtgaaccccgccgcgccaaaaggtgggcagataacgttgagtgccctcggcaccttcgataatttcaaccgctatgcactgcgcggcaacccgggcgcacgcaccgagcagctgtacgacacgctatttacgacttccgatgacgaaccaggcagttattacccgctgattgctgaaagcgcacgctatgctgacgattattcctgggtggaggtcgctattaatccgcgcgcccgttttcatgatggtagccccattactgcccgcgatgtagagtttacttttcaaaaatttatgaccgaaggcgtgccgcaatttcgtctggtctacaaaggcaccaccgtcaaagccattgcaccgttaaccgtgcgcattgagttagctaaacccggcaaagaagatatgctgagtctgtttagcctgccggtatttccagaaaagtactggaaggatcacaaacttagcgacccgctcgccacgcctccgcttgccagtggtccgtaccgcgttacgtcctggaaaatggggcaaaatattgtctattcccgtgtgaaagattactgggcagcaaacttaccggtaaaccgtggacgctggaatttcgacaccattcgctacgattattacctcgatgataatgtcgcctttgaagcgtttaaagcaggtgcctttgatttgcgtatggaaaacgacgccaaaaactgggccacgcgttataccggtaaaaatttcgataaaaaatacatcatcaaagatgagcaaaagaacgaaagtgcccaggatacgcgttggctggcgtttaatatccaacgtccggtattcagcgatcgccgggtccgggaagctatcactctcgcctttgactttgaatggatgaacaaggcgttgttttacaatgcctggagtcgcacgaacagttattttcagaataccgaatacgcggccagaaattaccccgacgccgcggagctggtgcttctggcaccaatgaaaaaagatctaccgagtgaagtcttcacacaaatctaccagccgccggtatccaaaggcgatggctacgatcgtgacaacctgttaaaagccgacaaacttctcaacgaagcgggctgggtgctgaagggtcagcaacgcgttaatgccacaacgggtcagccactcagctttgaattattgcttcccgcaagcagcaatagtcagtgggtattgccgttccagcacagcctgcaacggctgggtatcaacatggacattcgcaaggtggataacagccaaatcactaaccgcatgcgcagtcgcgactatgacatgatgccgcgcgtatggcgggcgatgccgtggcccagttccgatttacagatttcctggagtagcgaatatatcaattccacttataatgcccccggcgtgcaaagcccggttatcgacagcctgatcaaccaaattattgccgcgcagggaaataaagaaaaattactgccgttggggcgagcactggatcgcgtattaacgtggaattattacatgctgccaatgtggtacatggcggaagaccgtctcgcctggtgggataaattctcccagccggccgtgcgccccatctatagcctcggtatcgatacctggtggtatgacgtcaataaagcggccaaactgccgtccgccagcaaacagggagagtaaatgggcgcttacctgattcgccgtctgttgctggtgatcccaacattatgggcgattatcaccatcaactttttcatcgtgcaaattgcgcctggcggtccggtcgaccaggccatcgccgccattgagtttggtaatgccggagtattacccggcgcaggcggtgaaggtgttcgtgccagccatgcgcaaacgggtgtcggcaatatcagcgacagtaattaccgtggcggacgcggattagatccagaagtgatcgctgagatcactcatcgctacggttttgataagccgatccacgaacgttacttcaaaatgctctgggactacatccgctttgattttggcgatagcctgtttcgcagcgccagcgtgctgacgctgattaaagacagtctgccggtttccatcaccctcggattgtggagcacgctgattatctatctggtgagcattccgttaggcattcgcaaagctgtttataatgggagccgctttgacgtctggagtagcgcatttatcatcatcggctacgccattccggcctttttgtttgccatcctgctgattgtcttcttcgcgggcggcagctatttcgacctgttccctctacgcggcctggtttccgctaactttgatagcctgccgtggtatcagaaaatcaccgattatctgtggcatatcacgctgccggtgctggcgacagtgattggtggctttgcggcgctgaccatgctgacaaaaaacagtttccttgatgaagtgcgcaagcaatacgtggtgaccgcgcgtgcgaaaggggtaagtgaaaaaaatattctctggaaacatgtgttccgcaacgccatgctgctggtgattgccggttttccggcgacgtttatcagcatgttttttaccggcagcctgctgattgaggtgatgtttagtctcaatggtctgggcttactgggctacgaagcgaccgtcagccgcgattatcctgtaatgtttggtaccttgtatattttcaccctgattggcctgctgctgaatattgtcagtgatatcagctatacgctggttgatccgcgtattgattttgagggacgttaatgagccgactcagccccgtcaatcaggcccgttgggcgcgttttcgtcataaccgtcgcggctactggagcttatggattttcctcgtcttgtttggtttgagtttgtgttctgaacttatcgccaacgataaaccgttgctggtgcgttatgacggcagttggtatttcccgttattgaaaaactacagcgaaagcgattttggcggcccgctggcaagtcaggctgattatcaggacccgtggctgaaacaacggctggaaaataacggctgggtactgtgggcaccgattcgctttggtgctaccagtatcaactttgctaccaataagcccttcccttctccaccctcccggcaaaactggctgggaacggatgccaacggcggcgatgtgctggcacgcattctctatggcacgcggatcagcgttctgtttggcctgatgctgactctctgttccagcgtgatgggcgtgctggcgggggcgctacaaggctattacggcggtaaagtcgatctctggggacaacgctttattgaagtatggagcgggatgccgacgctgtttttgattattttactttccagcgtcgtacagcctaacttctggtggctgctggcaattactgtcttgtttggctggatgagtctggtcggcgtggtgcgggcggagtttttacgtactcgtaatttcgactacattcgtgcggcacaggcgcttggcgtcagcgatcgcagtatcatcctgcgtcatatgttgcctaatgccatggtcgcgaccctcacctttttaccgtttattttatgtagtagcataaccaccctgaccagcctcgatttcctcggcttcggtctaccgctcggtagtccgagtctcggtgaactgctgttacaagggaaaaataaccttcaggccccgtggcttgggatcaccgccttcttgagcgtggcgatattattgtctttgctgatctttattggtgaagccgtccgcgacgcatttgatcctaataaggcggtgtaacatgacgcaaactctgttagcgattgaaaatttgagcgtgggttttcgccatcagcaaaccgtacgtacagtagtcaatgatgttagtctacagattgaggctggcgaaacgctggcgctggtgggtgagagtggtagtggcaaaagcgttaccgcgctgagtattttacgcctgctcccttccccgccggttgaatatctctccggcgatattcgttttcatggcgaaagcctgcttcacgccagcgatcaaacgttgcgcggtgtacgcggtaataagatcgccatgatttttcaggaaccgatggtgagcttaaatccattgcataccctggaaaaacagctttatgaagtgcttagtctccaccgcgggatgcgtcgggaagcggctcgtggcgaaattcttaactgccttgatcgcgttggtatccgccaggcggcaaaacggctgacagattatccgcatcagctctccggcggcgaacggcagcgggtgatgattgcgatggcgctgttaacgcgaccggaattattaattgccgatgaaccgaccaccgcactggacgtctctgtccaggcgcagattttacagctgttgcgcgaactgcaaggcgagctgaatatgggcatgctgtttattactcataacctcagcattgtcagaaaactggcccaccgcgtggcggtaatgcaaaacggtcgctgtgtcgagcaaaattacgccgctacgctatttgcaagtcccactcatccttacacacaaaagctactcaacagtgaaccgagtggcgatccagtgccgttgccagaacctgccagtacgttgctggatgttgaacagcttcaggttgccttccccattcgcaaagggattttgaagcgcattgtggatcataatgtggtggtgaaaaacatcagttttacgctacgagcgggtgaaacactgggtttagtgggcgagtccggttccgggaaaagtacgacgggactggcgctgctgcgactgattaattctcagggcagcatcatctttgacggtcagccactgcaaaatttaaatcgccgccagctgttacctattcgtcatcgcattcaggtggtatttcaggatccaaactccagcctcaacccacgactcaacgttttgcagattattgaggaaggcttacgggttcaccagccgacgctttctgccgcacaacgcgaacaacaagtgatagccgtgatgcatgaagtgggattagatcctgaaacacgccaccgttatccggcggagttctctggtggtcagcgacaacgtattgcgattgccagggcattaattcttaagcccagcctgatcatacttgatgaaccgacaagtagtctcgacaaaacggtacaggcgcaaatattgacgctattgaaaagtttgcaacaaaagcatcaactggcctatttgtttatcagccacgatttgcacgttgtccgcgcgttatgtcatcaggttatcatactgcgacaaggggaagtagtggaacaaggaccgtgcgcgcgcgtgtttgccacaccgcagcaggagtatacgcgtcagctactggcgttgagctgacgcttaaaaaggattgtagttactaaagggttcggcaattgccacaccaaaatttttcaatcggcatgttgcagcaaactcgtcctggcgatttacaaacaggcacggctcaccttcacactccagcacgctacatggaacttcgatgtcgcttaacgcctggcttagtttatacatcacgctccatgcattatcaccatccgggctaagcaatttaagcgccaccaggctgttgtcaccgcacggtccattttgcggaatcggttcaaccttgctacctgcgaaaccagcagaccagcgatagttctgcggcagtcgatggacgatactgagttgtaaactagtcacttattttccccggaagcacattcacttcacaatttgtttacatcaattttaacacatcatcaacaatccgtctttatacagatcgtaaagattgatgcctcgcctgcgtggcctctatggctctgatttaagtaatatctgcgggcgtggtcacgtttgcggggctatatgtacccgtttctgcgatctaactcaacctttttaactacaatgatgtgactttttacataaattgattttacataaaataaacatatatcgggggaatgatagatttgtggttgacatgcatcaacaaaggaagccttttagcttcctcgttgtgcaatagatcaccgttttttcggccgactggcgtacagacagaagagaatggagctggttgcgcagaatgcaatactccaaatcatcggccatgcagagttaaaggtcgcaagagaaagcaatgcgccaacaattgcccctatgccaaaacggaaggttcctgccaggctagatgccgttcccgccatatggggaaactcatcaagaatgaccgccatcgcattggaactcaccatgctcacgcagcccacaaacgccgcaacgccaaccaccaggctccaaaatcccagccccagcagcgcactgatgaccatccacgctgccataataaattgtatccacaacccgctgcggaacatatttaacgcgccaatgcggcggacgaagcggctgttaaagatggtcatcacgaacagaaaaacaatgtttagcgcaaagtaataaccaaagttttccggcgcgacgtggttaatttcaatataaacaaacggtccggcgcttaagaaactgaacatcccggcaaagctgaaaccactggcaagcatgtagctcaggacacgtttatggcggaacagcgccgcaaagttaccaatagtggtacgaatgtgaaatggctgacgacgctccggtggtaaggtttctttaatcaggaagaaaatcattgcgctagccagaatcgccgctaatgccaggatccagaagatgtaatgccagctcagccacaccagcacccagccgccaactatcggtgccatcagcggtgcaatggttgtcaccagcatgacaaagctcatcatccggctgaactcttctttcgggtaaatatcgcgcatcagggcgttaatgaccacgctggccgcagccgcagccagcccgtggaagaaacgcatcacaatcagctgatcgatggtgtttgccaacgcacacgccaccgcggcggcggcaaacaccagcgtaccgccgagcaccaccggcttacgcccgaagctgtctgccatcggcccgtagattaactgccccaacgcaaagcccagaatataagtactgagggtcatctgcgtactgcccgccggtacgccaaactgcgcactaattaccggtagcgcgggcagatacatatcaatgctcagcggcatcaacatggccagcaggccaaggataaaaacaatagcaaagctgctatgctgtcgggtggtcacaacgggctcctgaaagtcattgaaaagttagacgacgctggcaatttcttcttcagttaacggacgatattcaccgggggctaaatcagcatccagcgtaataccgccaatacgttcacgatgcagctcaaccacgtggttacccacggcggcgaacatgcgtttcacctgatgataacgcccttcgctgatggtcagacgaacctgcgttggggtaatcacttccagcaccgcaggcttagtgagatctttttcgttatgcagctgcacgcctttagcaaattgctctgccgtatcgtcagctacaggactttccagtgtcaccagataggtcttctcgcaatgatggcgcggagaagtaatgcggtggctccactgaccatcatcagtcatcagcaccagaccggtggtatcaatatccaaccgccccgccgcatgcagtttccacgctaccggttcatcaagaaaatagagcaccgttgggtgatcagggtcgtccgtggagcaaacatagccctgaggcttattgagcatgaagtaacgtggaccgtgttgctgcgccagcgggttgccatcgtaagcgacatcatgttcaggaagcagtttgaacgctgcattacggacgatttcgccatcgacggtgacacgattgccgcggatttcacgcccggcaatagcacggctaacgccgagttgctgtgcgataaatttatcaagtcgcatgtgtgtgattttgcctgtaaaaacggaggtcgggcattgacccgaaaatctgaactgttgtctgcccagtatagcggtctaataacatccctcaagggaaaaagatccatggcatactattagcagaataatctacctacgcgagaccatgatttttacacttcgcccatatcagcaagaagccgtggatgccacgctcaaccattttcgtcgtcataaaacccctgccgttatcgtgctgcccaccggcgcaggtaaaagcctggtgatagcggaactggcacggctggctcgtggtcgcgtgctggtgctggcacacgttaaagaactggtggcgcaaaaccatgcaaagtatcaggcgctggggctggaagccgatatttttgccgccgggctaaagcgcaaagagagccacggtaaagtggtatttggcagcgtgcagtctgtcgcccgtaatcttgatgcctttcagggtgaatttagcctgttgattgtcgatgaatgtcaccgtattggtgacgatgaagagagccagtatcagcaaatcctcactcacctgacaaaagtgaatccccacttacgcctgctggggctgactgccacgccttttcgattgggcaaaggctggatctaccagtttcattatcacggcatggtacgcggcgatgagaaagcccttttccgtgactgcatttatgagctgccgctgcgttatatgattaaacacggctatctgacgccgccagaacgactggatatgccagtagtgcaatacgatttcagccgcttgcaggcacagagtaacgggctgttcagcgaagccgatctcaaccgtgagctgaaaaaacaacaacgtattaccccgcacatcatcagccagattatggagtttgctgcaacgcgcaaaggggtgatgatttttgccgcgacggttgaacacgcaaaagagattgtgggattactgcctgccgaagatgcagcactgattactggcgacacccccggcgctgagcgcgatgtgttaattgaaaattttaaagcccagcgttttcgctatctggtcaacgtcgcggtactgaccaccggatttgacgccccgcacgtcgatcttatcgccattctgcgccctaccgaaagtgtgagtctttaccaacaaattgtcgggcgcggtctgcgtctcgctccgggcaagactgattgcttaattcttgattatgcgggtaatcctcacgatctctacgcgccggaagttggtacaccaaaaggcaaaagtgacaacgttccggtacaggttttctgccctgcctgcggttttgccaacaccttttgggggaaaacgaccgccgacgggacattgattgaacactttggtcgtcgctgtcagggatggtttgaagatgacgacggtcatcgcgaacaatgtgacttccgtttccgttttaaaaattgcccgcaatgtaacgcggaaaacgatattgccgcccgccgctgccgcgaatgtgacaccgtactggttgatccggacgatatgttaaaagcggcgctacgactgaaagacgcgctggtattacgctgtagcggcatgtctttgcaacatgggcacgacgagaaaggcgaatggttgaaaatcacctattacgatgaagacggcgcggatgtgagtgagcgtttccgtctgcaaacacctgcccagcgtaccgccttcgagcagctttttatccgcccgcatacgcgcacaccgggcatcccgctgcgctggatcaccgccgccgatatcctcgcccagcaagccttattgcgacacccggattttgtcgtcgcccgcatgaaaggccagtactggcaggtgcgtgaaaaagtgttcgattacgaaggtcgttttcgtctggcgcacgaattacgcggttaatggtagttttgattgatgtataaggcgattgagtatagaatctcgcccgcttttgcatacgcaaagcagatcacttacctgttgctgggtcgcctgtagcaggattaatttaagagagaaagaaatgtttactatcaacgcagaagtacgtaaagagcagggtaagggtgcgagccgccgcctgcgtgccgctaacaagttcccggcaatcatctacggtggcaaagaagcgccgctggctatcgagctggatcacgacaaagtcatgaacatgcaagctaaagctgaattctacagcgaagttctgaccatcgttgttgacggtaaagaaatcaaagttaaagctcaggacgtacagcgtcacccgtacaaaccgaagctgcagcacatcgacttcgttcgcgcttaattgctgaataagttgtaaaaaaccccgctccggcggggttttttgtatctgcagattatgcctgattacggtattgctattttttgcaggccagataaggcgttcacgccgcatctggcattcagaacacaaaaccgattaattgccgccagacgtccggcgctgcaattggtcgcgcaaattcggcggcgtgcctttaatggtcaaggtatcggttgctggatcccagaagatgcgttcacctaacagcatcgcatcaaagttaatagtcaagccaccgccgctaccggcaaacttcgtcaactgacgcagtgtgctacggtctgccgggaagctctcttccagttcgtagcctttttcagccgcaaactccgtgaagctcacttcgcttacgcctgccagctctttgctcaggcttttcagttcgatctcttcgcctgcctgcagctgctcattacagtagctataaacctgctggcgcacgttctgtcgctctgctttatccagttgtgcttcggcagtgaaatcatcaaccgcttgcaacagcccacggttttgcgctttcgcgtttaacccttcgctggccccgaggaaatccataaagaaatccgccactttgcgccctactcgccctttcaggaaagtgagatagcgggtggactctggattggtttcccattcggttaaatcgatacgcgcaacaatatccgcatgattgatatcaagataatgggttgggttgatgtcgagattttcgttaacgcgcatactgctcaggttgctcagaactgccaccagcaaatactccaccgccagatagcgatagtggcaaaacagcacgaatccaccgtcagcaaaaggatatttcgctaattcgtcacgcaggcggccggttgccgcgcggctaaatgccaggaagtcctcttcgccctgacgctgtaagcgcagcgtctgcgccagttcactctcttcgctaaacaagccgtaagctttatttttggcgctatagacccgatgcagttctgccaccatctcaacgacggtttctgtcggttccagcaaactatcgcgcaacaccagctcaaggttctgctcatcacgcttgataagctggtgcagagcaatctggttgatatccagactcatgataaactctcctttaagaccgggcggtattcaaccaccgccggttaagcgacgcaataaaagatggcggtcattttacagaaggcagcgtaacgagaatgatttaacgcataaaaaagcagaaaaaaaaccgttgctacggtaatatgttgccctttcatcaactaactgatttcgatttatgccacaaatttcccgctacagtgatgaacaggttgaacaattgctcgcagagctgctcaacgtactggaaaaacataaggctccgaccgacctttccctgatggtgttaggcaacatggtcactaaccttatcaacaccagcattgccccggcccaacgccaggcaattgccaactcttttgcccgcgccttacagtcctctatcaacgaagacaaagcgcactaagggaaacagataacaggttatggtaactcatcgtcagcgctaccgtgaaaaagtctcccagatggtcagttgggggcactggtttgcactgttcaatattctgcttagcctcgtcattggcagccgttacctgtttatcgccgactggccgacaacgcttgctggtcgcatttattcctacgtaagcattatcggccatttcagcttcctggtgttcgccacctacttgctgatcctcttcccgctgacctttatcgtcggctcccagaggctgatgaggtttttgtccgtcattctggcaacggcgggaatgacgctattactgatcgatagcgaagtctttactcgtttccatctccatcttaatcccatcgtctggcaactggttatcaacccagacgaaaatgagatggcgcgcgactggcagctgatgttcatcagcgtgccggttattttattgcttgaactggtgtttgcgacgtggagctggcaaaagctgcgcagcctgacgcgtcgtcgacgcttcgcgcgcccgctggccgcattcttatttatcgcctttatcgccagccatgtggtgtatatctgggccgatgccaacttctatcgcccgatcaccatgcagcgcgctaacctgccgcttagctacccgatgacggcgcgacgttttcttgagaagcatggtctgcttgatgcgcaggagtatcaacgccgtcttattgagcaaggtaatccagacgccgtttccgttcagtatccgttaagcgaactgcgctatcgcgatatgggcaccgggcagaatgtgctgttgattactgtcgatggcctgaactacagtcgcttcgagaagcagatgcctgcgctggcaggttttgctgagcaaaatattagcttcacgcgccatatgagctccggcaacactacagacaacggcatctttggcctgttctatggcatcagcccgagctatatggacggcattctgagcacccgtacgcctgcggcattaattactgcgcttaatcagcaaggctatcagctggggttattcagtagtgatggctttaccagcccgctgtatcgccaggcattgttgagtgatttcagcatgccgagcgtacgcacccaatccgacgagcagaccgccacgcagtggatcaactggctgggacgctacgcacaagaagataaccgctggttcagctgggtttctttcaatggtactaacattgacgacagcaatcagcaggcatttgcacggaaatatagccgggcggcaggcaatgtcgatgaccagatcaaccgcgtgctcaatgcactgcgtgattctggcaaactggacaatacggtggtgattatcactgccggtcggggtattccactgagcgaagaggaagaaacctttgactggtcccacggtcatctgcaggtgccattagtgattcactggccaggcacgccggcgcagcgtattaatgctctgactgatcataccgatctgatgacgacgctgatgcaacgcctgctacatgtcagcacacctgccagcgaatatagccaaggtcaggatttgttcaaccctcaacgccgtcattactgggttaccgcagcggataacgatacgctggcaattaccaccccgaaaaagacgctggtactgaacaataacggtaaataccgcacttacaacttacgtggtgaaagagtgaaagatgaaaaaccacagttaagtttgttattgcaagtgctgacagacgagaagcgttttatcgctaactgattaattataaatcagttagcgaaatatcttacttgcaatcggtgtggaaaacggtagtattagcagccacgagtcggcacgtagcgcagcctggtagcgcaccgtcatggggtgtcgggggtcggaggttcaaatcctctcgtgccgaccaaaaatcccaagaaaaaaccaacccttacggttggtttttttatatctgcaattaattcgataaacagaccgtgacacatcacagcctgtttattttctgttatcagaacgtcctgagctttcatcctatgaaattaattgctgttaaaagcattgggtacagaaaatacccatagctccatacccggagtcagtttttaaaaactgtttaaagaaatgcacaagtattgtgattgattttttagttgtttttcttgatgagaagctgatgcaaaattccgtctttataatgaaaatgatgccaaagcgaacgacaaggttgtagttttcactacatgtccatacataaaatggggtaacattcacgcgcctggtagcgttaccaacgctacgctcaaacataatgattctaataaaacctcaggagactactatgcctgaagcaacaccttttcaggtgatgattgtggatgatcatccacttatgcgacgcggtgttcgtcagttactggagcttgatcctggctctgaagtggtcgccgaagcgggcgacggcgcgagcgctatcgatctggcgaatagactggatatcgacgtgatcttgctggatctcaatatgaaaggtatgagtggcctggatactctcaatgccttgcgcagggatggcgttaccgcgcaaattattatcctgaccgtatccgatgcctccagcgatgtctttgcgctgatagacgcaggcgcagacggttatctgttgaaagacagcgacccggaagtattgctggaagcgattcgtgccggagcgaaaggcagcaaagtctttagcgaacgcgtcaatcagtacttacgtgaacgtgaaatgtttggcgcggaagaagatcccttcagcgtgctgacggagcgcgagctggatgttctgcacgagctggcacaggggctgagtaataaacagattgccagcgtgttgaatatttccgagcagacagtaaaagtacatattcgcaatctgctgcgtaaactcaatgtccgcagtcgcgtggcggccaccattctgttcctgcaacaacgcggggcacaataaaaatagcccgatggatttatcatcgggctgagatttatgacaaacgcaaaactgcctgatgcgctacgcttatcaggcctacgtggatcgatcaatttattgaatttacacaattttgtaggccggataaggcgttcacgccgcatccggcataaactaagcgcactttgtcaacagtctagcccgatggcatcaccatcgggcctctttttatttactctcctgcgggctcaaatgttgcatcgcctgcgcgatactacgttcaatcaccgcacggcgagtatcgttggcaggtaagagtttcaacatcatctcccacgcggcaacggcttcgccaaatcgctgctgctcaaaggcattaaacgcatacatgcttagcacacggatattgctatggtccgttctcaccagctgacgtagcagttcaccgccgaggcggttgtcgttgggatcagaactacgagtcaacgcttcagcgtatcccagtgcagcatcactgtttttcggatcgaggcgatacgcagtggcgtatgcatcggtggcgatactggcgttacccagcgccatgccaacgcggcccaacataatccagccttctatatctcccggatttttttgcagttgagtacgcatccccagcgcaagacggctcatctcttcttcgttgagcggatcggctttcggatccagcgccctgtccagcaacgccggagcctgtgccgtggcctgctgccagattttcacctgctgataattgccagtctggtagtagctgacgccagccacaattaacgccaccacaatacccggcagataaacaacatatccggcacgcttaccttccggcacgctttgttcaggaaacgcttccggcaccacgcgtacccgacgccggctgcgggcgtatatgacccaaccgccaatgccaatagccactactggcagcacccacagcagcacggtcagcggcgttaacggcggatcgtaagtgacgaagttgccgtaacgcgccaccatataatcgacaatctcttttttacttttaccttcctgcatcagttcatacactttctgacgcaggtcggtggcaatcatgctgttggaatcggcaatgctgttgttctggcatttcgggcagcgcagttcttcagtgagctgacggaactgttgttcctgtgcttcatctttaaactgcaacacatcgatggtcgccagcgcactgccggagatcatcagcatcagcacgcccaataaaaacctcattgtgcggcctccttactgtatttctcccacagcggcttgatctcttcttcccagacgcgaggattcagatcgcccgcatggcgatagcgaatgatgccgttgccgtcaataagaaacgtttctggcgcgccatagacaccgagatccagccctaacatgccatcgccatcaaacaggcttagcgcgtaaggattgcccagctctttcagccagctgattgccttctggcgatcgtctttatagttcatgccgaccacgcggatgccctgcgcagaaagctgattcagatattgatgttccgcacggcaggtcggacaccaggtcgcccagacgttaagcagtactggtttgccctgagtcagcacatccgcctgataaaactgccccggattgtccagactttcgagacgaaacttcggcacaggcttgccaatgagcgcgctttccagattggtcggatcatccccttcggcattacgcgccagctgccacagcagcgccgcggcaatcgccaggaagataatcaacggaattaacaatactttgcgcttcatacggcctccggcgcagttttttgcggactcacgcgcttacgatagcgaggatcaaacagacacagcagtccgcccaacgccatcatcagcccgcccgcccaaatccagcgaacaaatggtttgtagtaaagacgcacggcccacgcgccgttttccagctcttcaccgagggccgcgtacaggtcacgcgtgatgccgccgtcaattgccgcttcggtcatcatgctcccggcagtgttgtaataacgtttttccgcatacagcaccgtttccggcttgccatcgcgcgttacgccgatagtcgccacaccgccacgccagttcgggccagtcacctctttgacatcacggaaggtgaagcgatattcatgaatatcgacgctatcgccggacttcatgcgcacatcacgctcaacgctatagttctggctaaaggcaatgccaacaattgtcactgccagcccaaggtgagccgccaccatcccccaataactgaaggtggttttcgtgccgcgactaatacgtagcgcagcttccgcaattgccagcaccgcaatccagcaggccattgccaggccgagcaccgtcatcgccacaactttgctttcgaacagccacggcaacagcaggctcagcaccagcgtagagatgaaggcgataatcaataaattgcggatcttacgcgggcgatcccgcccccagcgcaccagaggaccgacaccaagcagtagcgcaaacggcaccatcagccaggtaaacatggtgttgaagaacggttcgccaatgctaatactgcccagtcccagttgcttatgcaccaacggcagcagcgtccccagcaacaccaccagcatcgcagcgaccagcaaaacattgttcgctaacagcaaagattcccggctccacagcgcattgtttacgcgactgcgaactttgtgtccacgcgcggcaaacagcagcaggctaccgccaatcaccagcaccataaaggcgaggataaacataccgcgcgccggatcagacgcaaacgcgtgtacgcttaccagcacgccggaacgcacgaggaaagtccccaacagacacaagctgaaggcactgattgccagcagtaatgtccacgctttgaagctggcgcgttgttcagtgaccgccagactgtgcatcagcgcagtccccaccagccacggcataaagctggcgttttctaccggatcccagaaccaccagccaccccagccgagttcgtaataggcccatgcggaaccgagcacgatgccgagcgtcaggaagatccacgctgccagcgtccacggacgagtaaaacgcgcataagtgctgtccagacgcccgctcagcaaagaagcaatggcaaaagcaaacgccacgctgaaacccacgtaccccatataaagcagaggcggatggaagatcagccccggatcctgcaatagcgggttaagatcgcgaccttcaatcgggaagttcggcaacgtgcgagagaacgggttagaggtaaagagaatgaacagcaaaaagccgacactgaccatccccattatcgccagtacacgggccacaatatccagcggaatacgctgactaaaaatcgccaccgcaaaggtccagccgctcatcagcagcacccacagcagtaggctgccttcatgcgcgccccaggtagccgccacgcgataccacaccggaagctgggtattggagttgctggcaacataggtgacggtgaagtcgttgaccacgaaagcattgaccagcaccagaaatgcgccagccacagacataaacagcagccaggcaaacaagcgggaagacgccatcatgcgcgcatctccgcgcgccacgccccatagcggatacacggacagcagcagcgcaattcccagcgccaggcacagcagtccgttaccaatttctggcatcatgatgctgggtccttataaacttacgtcaacttgctgggtccttataaacactcgccgggcgacggtggttagcttccatcgctttctcaacttctggcggcgtatagttttcatcgtgtttcgccagcacttctttcgcgaggatatgattgcctttttccagttcgccctgcaccacaacgccctgcccttcacggaacagatccggcaaaatgccttcgtaagagacatccacactgccttcagcatcgtaaatggtgaaggtcactttcaggctattgggatcgcgctgcacactacccggcatcaccatcccgccaacgcgcagacgctgaccgacttccggcatttgctgagtttcacgcttgccgtagagaatttcccccggcgtataaaagagatcgatattgctgcgcagcgcatatagcaccagaccgatagtcagcgccagccctgccaacacggcacaggcaatccacaagcggtttttacggcgaatattcatgcagcctcctgctgttgcgcagcacgtaaacgcgcctcacgcgcccgctgttgcgccacgccacgcagaattgcgcgatgttgcatcacgctgtgcacgaccaaaaccaccagcggaataacggtcatcaccaccgccagccagacaaaaaaggcgtaaccgcccattgcgaaaaattcattccaggaagcaaatgcaggggtcatttacggcctcttttcagtatcagttcactcacccacggacggcgtttttccatcagcaaaatcaaattacgcatccgcatcagcgtcagcgtggcagacaggagcaggaagccaaaaatgctccagcgcagcgggctacgcatcgccggatcgatactttgctgcatccgcgtacttccctgatgcagggtgttccaccactccacggagtaatgaataatcggcagattcaccacgccaatcagcaccaggatacctgccgcacggcccgccagacggcggtcgtcgaaggcgtgccacagggcaatcacacccacatacaaaaacagcagcaccagttcagaagtcagacgtgcatcccatacccaccaggtgccccacatcggttttccccatgcagagccggtaaccagggcaataaaggtaaacacggcaccaatgggggccatcgccgccaccgccaggttggccattttcatctgccagacaaggccaataaacgctgccactgccatacttgcataaatgcccatgctccagatcgccgcaggcacatgcaggtagataatgcggtagctatttccctgctgataatcagccggagcaaagccgaatccccagatccagccgacggtaagcacgaccacactggcaattgccagccacggtataaaccagccacagatttgatacagccgtggtgggatcgccagttgatgcagtgttttccacatagtttcgataccagactcgaacaaaaatcagtaatccagcgttattgaatgctgattcgtaacgctgccgccgtcgcaaaaggacttaatgtcgcggtgcctgccagcaacgcgcctaaaattgccagatacccgtcaacgggcaaatgcatagaagccgcgtccatcgcggcggtggcaaagatgagtaatgggatagtcagcggtaacaccagtatgctgagcagcacaccaccgcgcttaagtcccactgtcagcgccacgcccggtgcaccgagaaagccaagcgtaggcgttcccagcagcagcgtcagcgccatcacttgccagccataaacatccattcccagtagcattgctaccagtgggctaaggatgagtaacggcagaccggttaccatccagtgcgccatcaccttcgccagcacaacggcgggcaagggtaacggcaacaacatcaattgttcaagactgccgtcctgcaaatcgtcacggaacagtcgttccagcgccagcaaggaactaagcagcgcagcaacccagataatgcccggtgcaatacgcgccagcagttgcggctccggaccgatactgagcggaaaaagggtaattacaatcaggaagaaccacagcgggttggcgatttcggcgctatggcgaaacgctacacgcagctcaagacggaaaatgcgccagaacatcatgcggccctcgtttgcgtcagactaatgcggcgaattttactttcagcaacgttgagcggctggtgggtagtcagaatcacaatccccccctgctccgtatgctgcgccatacgctgggtcagacgatcgacaccgttaacgtcaatcgcggtaaaaggctcgtcgaggatccataacgtggcacgggtcagccacagacgcgctaaagcgacgcggcgttgttgcccggcgctgagctgatttacaggaatatcttcgaatccggcaagcccggcctgcgccagggcttccagacattgtgcggtatcgccatcgcgatgataaaagtgcagattttctaacgccgtcagccgggttttgatccccggctgatggcctatccataacaggttttgatggtagctgtcgcgtacctgatgcaagggctgcccttgccagagaacctcgcctgcgtcagggcgagacaaccccgtcagcaaacggagaagcgttgtcttccccgcgccgttgctaccggtgatttgtacccactctcctgcgttcagcgtaaaactcaagccactaaataaggttcgttcatcccgctcacaaagtaactctctggcttcaagcatacccacgcaataaccctgttaaaaacctggctcgacttcacgcatatcgggcagcttgtgcgctatccctttatggcaatcaatacaggtttgcccatctttcaccgcctggtcatgcatcttcgcggcaacgcttttctgggcggttgtatccatatactcgaagttgtgacagttacggcactcctggctgttattgtccttcatgcgccgccactcattctgtgccatcgtcagacgatgagcttcaaatttctgcggcgtgtcaataacgccaaaaattttaccatacagctctttacttgctttgagcttgcgtatcatcttcggcacaaactcgtgcggaacgtgacaatccggacaggtcgcacggacgccgctacggttgttgtagtgcacggaatccatgtattcctgatacaccgtgttgcgcatttcgtggcagctaatgcagaactcttcggtattggctttttccatcccggtgttaaagccaccccagaagacgatgccgccaacaaaaccgatcaacagcagcgtccccagcgccagacggctgggggtacgccaccatttccacaggcgcttaatcagaccaggcttacggtcagaatttcccataataacctcttatttcccgtaacctttacttggggtaaaggtattccccacgattggcgcggtatcggcctgcggtacgtgacattgcagacagaaataacgacgcggagccacttccgcgcccactttgccgtcgctgtccataaagtgagtaggactgatacgcggcgcgccagtggtgcgatagctttcgacaccgtggcactgcaagcagcgattggtattggtcgttacctgataaccttcaacgctatgcgggatcattggcggctgattcacatagttcagcggcatccgatcctgctcttttggcatccgaatggccccttcctgtgtcccggatacttccgggctctggctaaaatcgacgccattagccgcccaaaccgcgccgcttaccaccagggccagcatcgccgtccattgacacagcgctttcttcaggtcatggcttttcatgatttcgctcccgaactccattatgtcaacttttcgctccgctactccatcgtgtagttattgtaaatacatcctcagaacagacatccacgcagcgaccgcacgtcatgcaatcgcggctggtgacctgcaccgggctttgttcatccagcaccggggcacgtagcacatgcggttccgggcaaacatgaaaacaatccatacagcggttacatttctgccgatcggtggccgcaacggtaatcacacctttgctacccagcacgccatacagcgcgccaaccggacaaatgtgcccgcaccagccgtgttcaacgaccagtagatcaaataaaaacagcgcgagaataagcagcgcgccgctgccgaagcccattaccaggctacgccccatcagagaaacggggttgatccattcccaaatgagcgtgccagttaaggcacttcccaccagaatgaccaccaacagcacgtagcgaatgtggcgagggatcgtcgcagactgattgaggtcaaagcgcctgcgtaaccagttcgctaagtcggtaatcgggttcagcgggcagacccagctgcaaaataatcgctttcccgccagggcgtagagcacggtgataatcaccgcaccggtcaacgccaccgtggcaggcagatgaccactggcaagactttgcagcgtcatcagcggatcggtcagcggaacggtgtcgaataacaggctactgctgtagttgccgtgcaagatccacacaccaaaccatggaccgctcaaaaacatccccagcacgaagaactgacaaaggcgacgtaacaccagccaacggtgactgcgccaccagccttttttctccagcgcctcgcgcccggcgtcacgtttacgatttgccattgttcccctccagccagccgttacttagcttttgccattgttcccctccagccagccgaagcggtaatggtgacctaactcccctttcgccagactcagcggtaacaccttgattgccggttgttccagcacgcatactttttcgcacttaccgcaaccggtacaggcgtcgctgtgaaccgtcggcagaaagcgggcgtgcttaccggtacgcgtgttgcgctccagctccagggtgatggcctcatcaattttcgggcattcgcgataacaaacatcgcagcgcagcccctgaaagttgagacagttttcctggtccaccagtaccgccagccccatccgcgcgtcgtcgatgctttcaatctcacgatccagcgcaccgcttgggcacactttggcgcacggaatgtcctcacacatttcgcaaggaatatcccgtgcgacaaaatatggcgtgcccgcgctcagaccagaggccagcgtcgccagttttaaggtgtcgtaagggcaagcctgaacacactgaccgcaacgcacacaggcactggcaaaggcgttctcgtttatggctccgggcgggcgcaaccgcacgccagatgcgcgtgcggtttgctgttgtaaccccagcgccacacccacggcagccagcccgcctgctgtgcgaacgacatcgcgcagaaagcggcggcgaccattttgaggtttcgcactccgggacataatggcttacaccttctccagtttgaccgcgcacttcttgaagtccgtctctttgctgagcggatcggtcgcatccagcgtcagtttgttaaccaactgtgcggcgtcgaagaacggcatgtacaccaggccctgtggcggacggttacgaccgcgcgtttcaacaatgctgatcacttcgccacggcgagaaaccactttcactttgtcgccacggcgcagatcgcgcgctttcgcatccagcgggtgaataaacaggaccgcttccgggaaggcgcggtgcagttctggtacacggcgagtcatactgccggtgtgccagtgctccagaacgcgtccggtagagagccacaggtcgtactcttcatccggtgcttccgccgccggttcgaatggcagtgcgaagatcaccgctttgccatccggtttaccgtagaacttatagccttcgcccgctttcacgtacgggtcgttaccttcgctgtaacgccactgcgtttctttaccgttcaccaccggccagcgcagaccgcgcgctttgtggtagtcatcgaacggtgccagatcgtgaccgtgaccgcgaccaaaccatgcgtactcttcgaacagccctttttgcagatagaagcccagctcgcgggattcatcgttcagctgatcttccgccagttcggataccgggaatttgctcacttccggtgtggcatacagcacttcgtacagcgttttgccacgcagttccggtttcttcgccagcagatcttccggccatacttcttcagttttgaagcggcgggagaactggactaactgccagagatcgcttttcgcttcgcccggtgcctgtacctgttgacgccagaactgagtacggcgttcggcgttaccgtaagcgccctctttctctacccacattgcggtcggcaggatcaagtcggcggccagcgcactgactgtcggatacggatcggagacgatgatgaagttgcgcggatcgcgccagcccggcatacgctcttcattgatgttcggcccggcctgcatgttgttggtacacatggtccagtaaacattcagtttgccgtctttcagcgcacggtcttgtgccaccgcgtgcagaccgattttcgccggaatggtgccgctcgggatattccacttcttctcgcagatatcacggtgtttctcgttggtcaccaccatgtccgcaggcagacggtgagcaaaggtgcccacttcacgcgcagtaccacacgcagaaggttgcccggtcagggagaacggaccgcaacccggctgggaaattttgccggtcagcaggtgcaggttgtagaccaggttgttagcccacacgccacgagtatgctggttgaagcccatcgtccagtaggagatgactttcttgttcggatcggcatacagctgcgccagttgttctaactggtctttcggcacgccggtcatttcggcagttttttccagcgtatactcggcaacgaaggctttgtaatcttcaaagctcatcggttcggaggcgtcagaacccggattcttcgctgctttttccagcggatgggtcggacgtaaaccgtagccgatgtccgtcgcccctttgcgcaggttaacgtgcttgctgaagaagtcctgatttatcgcattgttttgaatgatatagttggcgatgtagttcaggatcaccaggtcagattgcggcgtaaagatgatgccgttatccgccagctcgaagctacgatgctggtaggtagaaagcaccgccacggtgacgttctggttagagagacgacggttagtgatgcggctccagaggatcgggtgcatttccgccatgtttgcgccccacagcacaaacgcgtcagcctgctcgatgtcgtcatagcagcccatcggctcatccataccaaaggtacgcataaagccaactactgcgctcgccatacagtgacgcgcgttcgggtcgatgttgttgctacggaagcccgctttaaacagcttggacgcggcataaccttcccagatagtccactgaccagaaccgaacataccgatgctttccggccctttttctttcagggcggttttgaatttctcttccatcacatcgaaggcctgatcccaggtgattggggtaaattcgccttctttgtcatatttaccgtttttcatacgcagcagcggctgcgtcaaacggtctttaccgtacatgattttgggcaggaaatagcccttaatgcagttcaggccacggttaaccggtgcgtccgggtcgccctgacaggccaccacacgtccctgctgcgttccgaccagaacgccgcaaccagtaccgcagaaacggcacggcgctttatcccatttgatggcttcctgctgaccaacaacggcgcgggcaacgcccggcacgctgagaccggcagccgccgcagcggccgcaacggcgttagctttcataaagctacgacgactgagtttcatggtgtttcctcaccttgctcttcctgctggtgataaaccaggctcaccgccagcacgccctctacgttgcgtacactctcaatggtttggatcagcgtttcgctgtcttctgcttccaccaccacaatcaactgaccgctcggcgcgtcgctgacagcaacttcacagccgggaaaggcgttcagttgggtgctgatgtcactaattcgttcgcttttggcctgcacgaccaggctgcaaacttgccagttagtgtgcatggagatactccgcagttatggcacttaccggacagctggctgcacatgctccacatccgttgcaaagttggctattaagttgcggctggtagatcccggagagcgtcgggcgaaagataattgccattggctcacagctatcctgacagcggcggcattcaacactctgatacgccaggcacgcgtccccgatggtgaactgcaaatcccaggccctggtgtggcgcggagaaaataggctttcggggcaagcctgcgcgcaggcgtaacagaagctgcactcgttatttttgaaattaacgctcggatagccgcccgcgccgcgttgcagaatgttgttttcacaagcattaatacaggcgtcgcagcgggtgcaatgggtcagaaaatgagattcatcaccggaccagggcggacggataccgttactggctttgcgccagcgaccagtgagtatgccccgacgggatgcatcaatcttcacattgaccttccatcattaacgcgctctgaaaattgagagcgaccaaataaaccgcataattaataagccatttttatagccgctaagatattaaaggatgtgtcaaagatgcataccccgatcggggtaaaacctgtagcaggatcaaaagagtggcgggaagcgtggcaaaaacgggcttttgctcacatttcaaatggttataaatatatttatatagcgattgattcaccagagatatttctgctggtttgctctctcattagaatttaacactaaaagagcaggtaaaattgtctgaatgttctttaagttattcataaagcaaattaataaatctgatgaatatgttaaccttcagcgacatcatcggtgaaaacctataaatgaagaaggaaagcaaaaaaatgaagaccattctacctgcagtattgtttgccgctttcgctaccacttccgcctgggcggcagaaagcgtccagccactggaaaaaatcgcgccttatccacaagctgaaaaagggatgaagcgtcaggtgattcagttaaccccgcaagaagatgaatctaccctgaaagtagaactgttaatcggtcagacgctggaagtcgattgcaatttgcatcgtctcggcgggaagctggaaaacaaaacgctggaaggctggggctatgattattatgtctttgataaagtcagttccccggttagtacgatgatggcctgcccggatggcaagaaagagaagaaatttgtcaccgcgtatctgggcgatgctggaatgctgcgttacaacagcaagctgccgatcgtggtgtatacgccagacaatgtagatgtgaagtaccgcgtctggaaggcggaagagaaaattgacaacgcggtagttcgctaaactgccgtgaagtgcggcaccccgtaggtcagacaaggcggtcacgccgcatccgacatccaacgcccgagccggttgcctgatgcgacgctggcgcgtcttatcaggcctacaccgctgtgaagtgcggcaccccgtaggtcagacaaggcggtcacgccgcatccgacatccaacgcccgagccggttgcctgatgcgacgctggcgcgtcttatcaggcctacaccgctgtgaagtgctccaccccgtaggtcggataaggcggttacgccgcatccgacatctaacgcccaagccggttgcctgatgcgacgctggcgcgtcttatcaggcctacaccgctgtgaagtgctccaccccgtaggttggataaggcggttacgccgcatccgacatccaacgtccgagccggttgcctgatgcgacgctggcgcgtcttatcaggcctacaccgctgtgaagtgctccaccccgtaggtcggataaggcggttacgccgcatccgacatctaacgcccaagccggttgcctgatgcgacgctggcgcgtcttatcaggcctacaccgctgtgaagtgctccaccccgtaggttggataaggcggttacgccgcatccaacatctaacgcccgagccggttgcctgatgcgacgctggcgcgtcttatcagcatacgccacatccggcataccatgccggatgtggcgtatcattacaacgcaatatccgccacttctttttgaacgggttgcggtttcaactgcggtttcggcgtactatctgctgcctgcggcttgtcgtagttcaaccccagcacttcgctggtgtactgcaactcgcgttctgttgccgctacatcaccgttcagcttgcgtccataagacggaacgatcgctttcaacgtagcctgccattgcgggctggaaacacgatcgccaaatactttttccagcagattcaacataatcggcgcggcggtactcgcccctgggcttgcccccaggagcgcggcaatggttccttgctggtcactgacgacttcagtacccagacgcagtacgccacctttctcggcatcacgcttgataatctgcacgcgctgccccgcttgccacaaacgccagtcctcttttttcgcctgcggatagtactctttcaacgcttcaaaacgatcctcttcactcaacatcacctgactcaccagatatttcaccagatcgaaattatccagcccgacgtgcatcatcggcatcacgttagaggtggtggtggaactcattagatcccacaaactaccgtttttgaggaatttggtactgaaggtggcaaatggcccaaacagcactacgcgtttaccgtccagaacgcgggtatcgatatgcggaacgctcatcggtggtgcgccaacggatgctttaccgtaaaccttcgccagatggtgattaaccacgtccgggttttcgctaacaaggaactgtccgcccaccgggaaaccggcgtagtctttcgcttccggaatcccgctttcctgtaacagcttcagcgccgcaccgcccgcgccgataaagacaaatttggcacgaatgttctgtgcagtgccatttttcagatcggcaacggtaacggtccaggtgttatcgtcattacgctttagggcgcggacttcgctgctgagttgcaggctgaagttagatttcttctgcaaggaagcaattaactggcgggtgatctcgccgtagttcacatcggtaccaatttccgtacgcgtggctgccactttctgttgcggatcgcgcccttccatcactaacggtgcccactctttgatctgcgcgtgatcttcagagtaacgcataccgcgaaacaggctgctttgttgcaacgcggcgtaacgggcgcgcaggaaattgacgttatcctcgccccagacaaagctcatatgcggaacggtattgataaaactacgcggagtacgcagcacgccgcgctcaacctggtgcgcccagaactggcgggaaatctgaaatgcttcgttaatggcgactgctttttcaatactgatgctgccatcggcgttttgcggggtgtagttcagttccatcagtgcagaatgcccggttccggcgttattccagccgttgctactctcctgcgcgacaccctccaggcgctccaccatggtcatgctccattcaggctccagctcgcgtaaataggtccccaacgtggcgctcataatgccgccgccaatcaacagtacatcagtttcctgctcctcggacgctttcgcttttgccgccatgctaacggcattaagccccacggccatgctgaagagcatggcagtcacttttttcatcttgttaatgccttacttttagtcgctttattgcaggtgagatttgcgcggcatcaacggtaacacttaagtaacaacatttaaataatgtttataaattatattctaattttagaaacattataatttcgttgattaattatagggttattagaaatgaagggatttttagcatattgacctgacggcagcagtccgccaggtcagcgtcgtaatattatgccgtccgggcaacggcatcacggctagcggcatcgcgctcttcgcccgtcagctcgctaagttgcccattgcgcatttccagcaggcggtcggcgtggataaagtaatgatcatcatgactgatagcgaaaatagttttacccatctcctgcatcagcggcagcaacacctgataaaactcacgacggaagtgtggatcctgatccgccgcccattcatccagcaggataatatcgcgttcttctgccagcgccagcaacagcgccacgcgttttttctgccctttacttaacttcaggttaacaatacgcccgttgcttaactcaagcttatgagccattttcagctgcgccagccacttctcaaccagttgcgggttagcgggtttaccctccggccccagcagttgatcaaacagccagacatcggtaaacactgcgctaaacagtttgcgataatcttccggttgttcgccgctgacaggtttgccatccagcaagatttcgccgctttgtggctgatacaagcccgtcaacaacatcgccagcgtgctttttccgctaccgttgccgccaatcagaaacagcagctcgccacgtttgatggtgagattaatcggaccaacggaaaacgcgttatcctgataagcaaacgtcacgttacgcagctccagcgtttgccagttgggaaacgcctgcgggcgcggaaactctgctttgaaaggcgcgagcgcgaatttgttcagcttgttaaacgccacctgcgccgtcagcagcgtcggcaatgcgccaaccgcgctaagcagcggcgtacgcaggaataaaagcgtcaagctataggtcgcggcaacgttggtatcagcccaaccgaggctgttcgccatccagaacaccaggccgattgcgcccagcatcatgatgttactccagttcacggcactaagatggaaggtgtctgcgcgaataatatggtggcgatactcttgcgcatcaggaatgtagaggttgttaaacacatactcggcgcgttcccggttcagagtcagctctttgcgcccttcaagtacagtttgaaaatccgtgtacagcttgtcttcggtttcacgcagggtcgccatatgtttgtacacccgcgccaccagcacaaaaccgccccagatggtgatcgccatccagatagccgttaccagcaacattttgccgctcagcatccacagatacgccgcactaccgatagtgagaatgatcccctgcaccagttccggcagacgcacaaaagcaatggtgatattgcgcacatcgctggttaaccccgccagcaagctggcgctaccgagttgttcaatgcgctcgacgtgagtatccagaatccgcttgataaattcactacgcagtcggtaaacgaagtgatgccccaaagtggtgagcgccagttggcttccgagagtgactgccatcaacagcagcaataatcccagaaactccggcaacaccagcagactggtatccgccgtttcgataaggcgctgattgataaaagcaattaagccaatgcctaatgccgcactggcgaggcttagcgccatcacactgataaatggccagcgatactgccgccagacaagtacaagaagttccatgcagaaaacccggacaatgaattacagcccgcagtttaaacatcttcgcgcgcacagcaataataattcttatttttattcttttttacctgcctgacggaatgtcaggttgtagcggcagtcgatggtgagtggatgaaaccccgctttcaacggttgaataccgtgataaaacagccggctttcaccgccccataccaccacatcgccatgttccaacaacaaacgtttgagcggatcatttcgtttcaggccgccaaattgaaaaatcgcgggtaagcccagagaaacagaaacaattggcgcgcgcagatccggttcgtctttatcctgatgcaggctcagtttcgcgccaggagcgtagcggttgataagacaagcatctggctggaaatctggatagcccgccgccgtagccgcacgttgacataaattatgaaaactctgtggcatggcgggccacggtttatttgtttgcggatcaatggggctatagagataaccttgccgatgggtcgtccagcccagatgcccacagttggtcatcgccacgctcatggtatatcccccgggggtgaccatctggcgaaacgggctctggctggcaacgtcattaatatcgcggatcagttgctccgcagcgttaaaagcaaaacgccgtaaaattaccgcaccagccgccagtggctcttgccacggttcagcatcggcaaacagatccaacattacctctcctcattttcagcttcgcggcgcagcagttgcgctttacggctcacgccccagcggtaaccggaaagtgtgccatcaccacggaccacccgatgacagggtattatgatagccagcttgttggcggcacaggcgctggcaacggcccgtaccgctttcggtttgccgatggcgttagccagttgctgataactgacggtttcaccgcaaggtatcgtgcgcagtgcctgccagacttgttgctgaaaagcagtgccgcgaatgtccagcggtaacgtcagcggcgtatcgcgttgattgaggctggcgatcacttcacgcacatgttgctgaaacatcagatcggcaggcgcgttgtcggcagcgggaaacatctgctgcaactcgctgattagtgtcgcgtcatcatcgcccagcaatatcgcgcaaatcccccgctcgctttctgccaccaggcaacgacccagctcacaatcagccagcgcgtaacgcaccgccagattttcgccaccgtgacggaattgtttagccgtcatgcccagcgtttcgtcagctttgcgatagtaactgctgctgtcggggaatccggcgttaagaatagacgtcgtcacgctctcccctttcgccaggctttcgcgcaaacggcgagcgcgccaggcctgttgccaggctttaggcgtcattccggtagtcgctttaaacaaccgatgtagatgaaatggactcatcgccacctggtcggctaaggcttccagcgttacaggcgtttcctgttccagcagtcgacacgcgtgggtgattttatccaaccgatgttgctgggcattggctttttctggctgacaacgtttgcaggggcgaaagccagcggcgagtgcctcgctggcatttgcgtagaaggagacgttttcccgcaaagcatgtctggcgcggcaagacggacggcaaaagatgcctgtggtacgcacggcgaaaacgaattcgccgtcggcattcgggtcgcgggctaagacagattgccagcgttgatcgtcagttaagcatgtggcttttttcataatcagctccctggttaaggatagcctttaggctgcccggtcaccatcacgcaaaaaccaacaatcttgcgctttaatttttttcgctgacaaggaagcttttaaactgtggactcatccaggttttaaagctatcgccttctttggtgatcatataaaccgccagcccttcccggcgaacaacctctttagctttctccggcccgagtaccatcaagccagtatcccaggcatcggcttccagcgccgtcggagcaatcaccgtcacggataccagattgtgttcgatgggacgcccggtttgcggatcgataacatgggaaagacgtttgccgtccagttcgtaatagttacggtagctgccagaggtgctaatcccatgaccgttgatatccaccacagcctgaaccgcgttttctttatcggttggtttttgaatcgctacccgccacggcaggccttcaccgttcataccacggctgttcagcgcgccgcccacgctcaccagatagcgggaaatcccttcctgctccatcaagcgtgccaaatgatcggccgcatagccttcgccgacggtggagagatcgacatataaatccggcaggtctttttgcagatattgctgatggctctgattgatgaccgtcaggtgctgtaagccggttttggctttcatcgcatcgatctgttcctggctcggaatttgaaccggctgttgttccgggccaaagccccacagattcaccagcggcccgacggttatatccatcgcgccatcggtcttcgcgccaatgcgcaggctggtggtgacgatatcggccatcgcttcacttaccggccacgggcttaaactttggctgtcgttaaagcgcatcagcgcggaatcttttttataggtgctaagcagctgatcgtcggcgtccagttgggtctgaatcttttctttaagttcggcgctgcgtttggcgtcaatgcccgggatgctggcacgccagaaggtacccatagttttgccttcaagaacggtaacttcagtagcgtgggttttggcgggttgtggtttttgatcgcaaccaacaaagaagagcgcggcagccagcagtgccacgcgggtaaagcttatttccatacgtgattatcctcatgcgaacggtcgcaagagtacaccaaaaaactgagtttgtacgctgaaaacaatgaaaaaagggcccgcaggccctttgttcgatatcaatcgagattagaactggtaaaccagacccagagctacgatgttatcagtgttgatgccagcgtcacgagtgaactggttgtcgtccagcaggttgattttgtagtcaacgtaggtggacatgtttttgttgaagtagtaggtagcaccaacatcaacatatttcaggatatcttcgtcgtcgtagccacgacccaggtttttacctttagactgcaggtaagccagggacggacgcagaccgaagtcgaactggtactgagcaacagcttcgaagttctgtgctttgttcgcccaacccagggaacctacgcgagttgcgttgtaggtctgggtgtactgagcagccaggtagatgttgttagcgtcgtatttcagaccaccagtgtaggtttcagcacggtcgccgttaccgatgtaagcagcggtgttctgagcatcagtacgtttggagctggagatcgcaccaccgataccgaaaccttcgtaatcataagtgatagaaccgccgacgccgtcgccgttttgacgcagtgcgtcacgaccgttgttagttacgccactagtaaagccttcaccagatgggttgccgtttttaccctggtactgaacagcaaagttcaggccgtcaaccagaccgaagaagtcagtgttacggtaggtcgcgaagccgttaccacgctgctgcatgaagttgtcagaaccgtaggtgtcaccaccgaattctggcagtacgtcggtccaggaagttacgtcataaacaacgccgtagttacgaccgtagtcgaaagaacccacatcctggaatttcagacctgcgaatgccacacgggtccaggagttgttttcgttttcagcgctgttgccctggatctgatattcccactggccgtaaccggtcagctggtcagtaacctgagtttcacctttgaagccaagacgcatgtaggtctggtcgccatctacatctttgttgtcagagaaatagtgcaggccgtctactttaccgtacagatctaatttgttgccgtctttgttgtaaacttcagcagcgtttgctgcgcctgctaccagcagagctgggaccaggagggacagtactttaactttcatgttattaaccctctgttatatgcctttatttgcttttttatgccactgcatactgattaaccctcattaatcagtcggcaagtccattctccccaaaaatgcagaataatccaacacgaatatgatactaaaacttttaagatgtttcatttatcgctatagatgtttcaaaatgtaaatgcaagggaactttttaagattattgcggaatggcgaaataagcacctaacatcaagcaataataattcaaggttaaaatcaataacttattcttaagtatttgacagcactgaatgtcaaaacaaaaccttcactcgcaactagaataactcccgctatcatcattaactttatttattaccgtcattcatttctgaatgtctgtttacccctatttcaaccggatgcctcgcattcggttttttttacccttctttacacacttttcattattctgtgctaccacagaaaaactataacgcttgttaactatttcacaaataattaacatccgcataatttccagcaatctttgtttatttgcaattatttttgttgggctttttgtaggttatttgtacagcaaaatggcgcttgtacatctatttcccccaatgcaggatgataaatatcacgggagaatagagaatcatcaatcaggtaagagtctggaatttcacactgtaccctttatactgccctatcacttcgcgaagttttaacaggtcataaacacgaatgcgtcagaaagagacaacggccacgacccgctttagtctcctaccggggagcattacccgcttctttttactgttgatcattgtgttactggtgacgatgggtgtaatggtacaaagcgccgttaacgcctggctgaaagataaaagttaccagattgtcgacattacccatgctatccaaaagcgcgtcgataactggcgttacgtgacctggcagatctacgacaacattgccgcgacgacctccccctcctccggcgaaggtttacaagagacgcgcctgaaacaggatgtctactatctggagaaaccacgccgcaaaacggaagcgttaatctttggctctcacgacaacagtacgcttgagatgactcagcggatgtccacttatctggatacattgtggggcgcagaaaatgtaccgtggagcatgtattacctgaatggtcaggataacagtctggtgctgatcagtaccctaccccttaaagatctcacctccggatttaaagaaagcaccgtcagcgacattgttgatagtcgtcgtgcagagatgttgcaacaggccaacgccctcgatgaacgcgaaagcttttctaacatgcgccgcctggcctggcagaacggtcattactttacattgcgtactacctttaaccagccaggacatctggcaacggtcgtggcttttgatctgccgattaatgatttgatcccaccgggtatgccgctggacagtttccgccttgagccagacgcgacggcaacgggaaacaatgataatgagaaagaagggacggatagcgtcagtatccactttaacagtacgaagattgaaatctccagcgcactcaactctaccgatatgcgcctggtctggcaggttccttatggcaccttattgctggatacgttgcaaaacattctgctgccactgctgctgaacatcggtttgctggcgctggcgttatttggctataccacattccgccatttctccagccgcagtacagaaaacgtccccagcacggcggtcaataacgaattgcgcattttacgggcaatcaatgaagagatagtcagtctgctgccgctcggcctgctggttcacgatcaggaaagcaaccgcactgtcataagtaacaaaattgccgatcatttgctgccgcatttgaatctgcaaaacatcaccaccatggcggaacagcatcaggggattattcaggcgacgatcaataacgagctgtatgagatccgcatgttccgcagccaggtcgcgccgcgcacacaaattttcattattcgcgatcaggatcgcgaagtgctggtaaacaagaaactcaagcaggcgcagcgtctgtatgagaaaaaccagcaggggcggatgatctttatgaaaaacattggcgatgcgctgaaagaacccgcacagtccctggcggagagcgcggctaaactcaacgccccggaaagcaaacaactggcgaatcaggcagatgtgctggtgcggctggttgatgaaatacagttagcgaacatgcttgcggatgatagctggaaaagtgagacggtgctgttctccgtgcaggatttaattgatgaagttgtgcctagtgtgttgcctgccatcaagcgtaaaggtctgcaactgctgattaacaatcatctgaaagcacacgatatgcgccgcggcgatcgcgatgccttacgacgtattttgctgctactgatgcaatatgccgtgaccagtacgcaattgggaaaaatcacccttgaggttgatcaggatgagtcctccgaagaccgcctgacgttccgcattctggacacgggagaaggcgtaagtattcatgaaatggataatttgcacttcccgtttatcaaccagacccaaaacgatcgctatggcaaggcggacccgctggcattctggctgagcgatcaactggcacgtaaactgggcggtcatttaaacatcaaaacgcgggatgggcttggtacacgctactctgtgcatatcaaaatgctcgcagctgacccggaagttgaagaggaagaagagcgtttactggatgatgtctgcgtaatggtggatgttactagcgcagaaattcggaatattgtcactcgccagttagaaaattggggtgcaacctgtatcacacccgatgaaagattaattagtcaagattatgatatctttttaacggataatccgtctaatcttactgcctctggcttgcttttaagcgatgatgagtctggcgtacgggaaattgggcctggtcaattgtgcgtcaacttcaatatgagcaacgctatgcaggaagcggtcttacaattaattgaagtgcaactggcgcaggaagaggtgacagaaagccctctgggcggagatgaaaatgcgcaactccatgccagcggctattatgcgctctttgtagacacagtaccggatgatgttaagaggctgtatactgaagcagcaaccagtgactttgctgcgttagcccaaacggctcatcgtcttaaaggcgtatttgccatgctaaatctggtacccggcaagcagttatgtgaaacgctggaacatctgattcgtgagaaggatgttccaggaatagaaaaatacatcagcgacattgacagttatgtcaagagcttgctgtaacaaggtagcctattacatgaacaatatgaacgtaattattgccgatgaccatccgatagtcttgttcggtattcgcaaaagtcttgagcaaattgagtgggtgaatgttgtcggcgaatttgaagactctacagcactgatcaacaacctgccgaaactggatgcgcatgtgttgattaccgatctctccatgcctggcgataagtacggcgatggcattaccttaatcaagtacatcaagcgccatttcccaagcctgagcatcattgttctgactatgaacaacaacccggcgattcttagtgcggtattggatctggatatcgaagggatcgtgctgaaacaaggtgcaccgaccgatctgccgaaagctctcgccgcgctgcagaaagggaagaaatttaccccggaaagcgtttctcgcctgttggaaaaaatcagtgctggtggttacggtgacaagcgtctcagcccaaaagagagtgaagttctgcgcctgtttgcggaaggcttcctggtgaccgagatcgctaaaaagctgaaccgcagtattaaaaccatcagtagccagaagaaatctgcgatgatgaagctgggtgtcgagaacgatatcgccctgctgaattatctctctagtgtgaccttaagtccggcagataaagactaatcacctgtaggccagataagacgcgttagtgtcttatctggcatttgcaccgattgccggatgcggcgtaaacgccttatccggcctacgattcccattatttcaacaaattacattaaagtaggccagataagacgcgtcagcgtcgcatctggcatttgcactgaatgccggatgcggcgtaaacgccttatccgtcttagctatcccggcttttcctgaccctctcggcatataacgtcagcgtctgttttatcacatccagcgttaccggcttgctcaggcagctgtccataccggactccagacaccgctgcttctcttcagccaacgcattagcagttactccgattaccggcaacgtcagtcccaactgacgaatgcgttgcgtcaagcggtaaccatccatatttggcatgttgacgtcgctaagcacgatatcaatatgattcttgctaagtacattaagcgcatcgacgccatcattcgcggttttacattgatagcccaagcttcccaactgatctgccagcaaacgccggttaatcggatgatcatccacgaccagaatcatcatatcgtcattatcgctgaccgctttgtccgtactcggcagagcgttagcaggatcgtcgctctccatctcgatcaaataaatacgcgccaacaatgccggtagctcatgcggagcagccacactgtgtacccactcccctggcgctttctccagcggaataccaatatggcgacgacagaaggtcactaccgctctgccctgccattttttactcactacctcgtcagtgatcaacacatcttcgggagtcggttcctgcccttcgtatgttgtaacgacgatgccgctgcgctgcaaactggtttccaggaactgacagaggctcgcattgcggaccgccagccagcagcgtttaccactcaacccttccacgccttttttctgcgggtactgagcgccgtacaacggaatacgcacggtaaactggctgcccattcccggttcactatctacgctgatatcgccgtccatcatgctgatcagtttttcacaaatcgccagacccagaccggtcccctggaaattacgctgtacgcccgttccgacctggaagaagggatcaaacaagcgcaccacttctttcgccggtatccccacgccggtatcgcgaacacggatagagagataatcgccatccgcgcgaacatgcaaaactatacagccggtatcggtgaattttatggcgttactcaacaggttggagatgacctgctgtaaacgcatcgggtcgccatttaaggccactggcacatccggttcaataaagcagtacaagcctaactgcttgcgtaccaccagcggtaaatagttggcggtgatgtggttcatcacttcacgcggactaaactcacgcggttcgatcttcaactgttcgctttcaatcttgctgaaatcgagaatatcgctgataattttcaacaacaggctggaagagttgttcattgccgtcaccagccgatcgacgcctttcggtaactctttggtttgcaacagatccaggttaccgataatgccatacagcggcgttcgcagctcatgactgacggtggcaaggaacatgcttttactctggctcgcctgttccgctgcttgtgccatctcctgcaagctctcttccatcttcacgcggctagaaacatccaccagcacacaaatggccacgttttcattacgatagcggctatggacgaagctgatttgcagattggtattgttgctggtcaggacatcaacaaaattgacctgctgcccacagataatttgcgtcagtcgttggcggtcctcatgcgtaagcatattgagataggtatgcgccagttcgttacttaaaatattgacgccatcagcggtacgcaaaatgcagatacccactggcgcggaggcgacaatcttgcgattgaactgctcatgttcttccagtcgcagggcgtcgctttccgccggaatgaaaatacgtcgctcgtacatccgtgcgagagtaaacaatgcagctccggcaagcacattcagcaaaattgcgttaaggatcaacatgcgaatgcgttccagcaccttatcaaccggcacgctatacacgatgcttaggctactgggtggcagatttttcttcagcaccagctcccggaacccttccgtatagccaaaccaggagcgttcctgcatccagcgaggatcgcccttaattttactttctggtccggtaaggctaatcagggtatgaccattttcatcaagaatggtaacccccatcggcaacgtacccggtaagaaaaagttctccatccggatggtctgctcgacacccaaaagcgcctgcaaccggttcgccagataaactggcgtcaacgcgtaaaaatacccgacgccagggcgcggaccttcgctgatccagtagaggttactgccgctatcatcttgtggtgcatttcgatatttattgatgcgttcatgcaaagctttcaacgcggtatcgcgttccactggcatatcacgcagaccgaaattggccatgcagaggttatcgctgccgattaaaaatacccggtttagatcgtaagccgcagaaaaattatcgcgccagtagcgcataaaccacgccaaactctccagagaacctcgccaggtgttactcattgcggaacaatcggagtcggcaaacagcggttcaaacgcaggcacatccgcctgcgtttctcgtccacgcggggaaagcacaccgttttctgcgcttaagcgattttcggcgatgtacttcagctctttcatcacatcagaggtgcgttgaataaagcgctgagcctgatcggaactcagattaaattcctgacgaatttcgctttctcgctgatgtaacgcattaacgatgtaaaaaacggaactaaaagcaatcaacagccagagcactaacgccaatgctctgaacatgtagcggctggctttcagggttgtacgaaaagaagcaaggtatttcaaaggggcgaagctccgcctcaggtgaccgatggagtgtggttaaggtagcggtaaaagcgtgttaccgcaatgttctctcttctctggaatatgatacaccgccgagaaatcatcaccttaacctctgataatcgtcatataccggacaagactagtggatttcagcatgcattatatgaagtggatttatccacgccgcttacgcaatcaaatgatcctgatggcaatcctgatggtcattgtcccaacgcttactattggttatatcgtagaaacggaaggacgtagtgcagtcttatctgaaaaagagaaaaaactttctgccgtggtcaacctgcttaatcaggcactaggcgatcgctatgatctctacatcgacttaccacgtgaggagcgtatccgcgcattaaatgcagaacttgcccccattaccgaaaatatcactcacgccttccctggcatcggtgctggttattacaacaaaatgctggatgcgataatcacctacgcgcctagtgcgctatatcagaataatgtcggcgttaccattgccgcagatcaccctggtcgcgaagtgatgcgtacaaatacccctttagtttatagtggcaggcaggtgcgcggcgatattttgaatagtatgctccccattgagcgtaatggtgaaatcctcggctatatctgggccaatgaattaaccgaagatattcgccgccaggcctggaaaatggatgtgaggattatcattgtgctcaccgctggtttgctgataagcctgctgttgattgtccttttctcccgtcgcctgagcgccaatattgatatcatcaccgatggcctcagcactctggcacaaaatattcccactcgattaccacaattgcccggtgaaatggggcaaatcagtcagagtgttaataacctcgcccaggcactgcgtgaaacgcggacacttaacgatctgattattgaaaacgctgccgatggcgtcattgccattgaccgccagggtgatgtaaccaccatgaacccagcagcagaagttatcactggctatcaacgccatgaactggtagggcagccttactccatgttgttcgacaatactcagttctacagtccagtactggatacgctggaacatggcaccgaacatgtggcgctggagatcagttttccaggtcgtgaccgcaccattgaactcagtgtcactaccagtcgtattcataacacgcacggtgaaatgataggtgctttggtgattttctctgatttaactgcccgcaaagaaacccagcgccgcatggcgcaagcagaacgcctcgccacactgggtgagctgatggctggcgtcgcgcatgaagtacgtaatccgttaacggctattcgtggttatgtacagatcttgcgccaacaaaccagtgacccaatacatcaggaatatctgtccgtagtactcaaagaaatcgatagtattaacaaagttattcagcaattgctcgaatttagtcgtccacgccacagtcaatggcaacaagtcagcctcaatgcattggttgaagaaactctggtactggtacaaaccgccggcgtacaagcgcgggtcgacttcataagcgaactggataatgaattaagcccgattaacgccgatcgtgaactgctcaaacaggtactactgaatatcctgatcaatgccgtccaggctatcagcgcacgagggaaaattcgcattcaaacctggcaatacagcgacagtcaacaggccattagcatagaggacaacggctgtggcattgatctcagcctgcaaaaaaagatcttcgatccctttttcaccaccaaagccagtggaaccgggcttggtctggcgttaagtcaacgcatcattaatgcccatcagggtgatattcgcgtcgccagtttgccgggctacggcgcaaccttcacgcttattttaccgatcaacccgcagggaaatcagactgtatgactgctattaatcgcatccttattgtggatgatgaagataatgttcgccgtatgctgagcaccgcttttgcactacaaggattcgaaacacattgtgcgaacaacggacgcacagcattacacctgtttgccgatattcaccctgatgtggtgttgatggatatccgcatgccagagatggacggcatcaaggcactaaaggagatgcgcagccatgagacccggacacccgttattctgatgacggcctatgcggaagtggaaaccgccgtcgaagcgctacgctgcggagccttcgactatgttattaaaccgtttgatctcgatgagttgaatttaatcgttcagcgcgctttacaactccagagtatgaaaaaagagatccgtcatctgcaccaggcactgagcaccagctggcaatgggggcacattctcaccaacagcccggcgatgatggacatctgcaaagacaccgccaaaattgccctttctcaggccagcgtcttgattagcggtgaaagcggcaccgggaaagagttgattgccagagcgattcactacaatagccggcgggcaaaggggccgttcattaaagtcaactgcgcggcgctgccggaaagcttgctcgaaagtgaactgtttggtcatgaaaaaggtgcatttactggtgcacaaaccttgcgtcagggattatttgaacgagccaacgaaggtactctgctcctcgacgaaattggcgaaatgccgctggtactacaagccaaattactacgcattctacaggaacgggaatttgaacggattggcggccatcagaccataaaagttgatatccgcatcattgctgccaccaaccgcgacttgcaggcaatggtaaaagaaggcaccttccgtgaagatctcttttatcgccttaacgttattcatttaatactgccgcctctgcgcgatcgccgggaagatatttccctgttagctaatcactttttgcaaaaattcagtagtgagaatcagcgcgatattatcgacatcgatccgatggcaatgagtctgcttaccgcctggagttggccgggaaatattcgagagctttccaacgttattgaacgcgccgtcgtgatgaatagtggcccgatcattttttctgaggatcttccgccacagattcgtcagccagtctgtaatgctggcgaggtaaaaacagcccctgtcggtgagcgtaatttaaaagaggaaattaaacgcgtcgaaaaacgcatcattatggaagtgctggaacaacaagaaggaaaccgaacccgcactgctttaatgctgggcatcagtcgccgtgcattgatgtataaactccaggaatacggtatcgatccggcggatgtataacaccaaaacttgctatgcagaaatttgcacagtgcgcaattttctgcatagccgctcattctccttataaatccccatccaatttatcccttcatattcaattagttaaataactaaatccaataatctcattctggcactccccttgctattgcctgactgtacccacaacggtgtatgcaagagggataaaaaatgaaaacaaaattgatgacattacaagacgccaccggcttctttcgtgacggcatgaccatcatggtgggcggatttatggggattggcactccatcccgcctggttgaagcattactggaatctggtgttcgcgacctgacattgatagccaatgataccgcgtttgttgataccggcatcggtccgctcatcgtcaatggtcgagtccgcaaagtgattgctagtcatatcggcaccaacccggaaacaggtcggcgcatgatatctggtgagatggacgtcgttctggtgccgcaaggtacgctaatcgagcaaattcgctgtggtggagctggacttggtggttttctcaccccaacgggtgtcggcaccgtcgtagaggaaggcaaacagacactgacactcgacggtaaaacctggctgctcgaacgcccactgcgcgccgacctggcgctaattcgcgctcatcgttgcgacacacttggcaacctgacctatcaacttagcgcccgcaactttaaccccctgatagcccttgcggctgatatcacgctggtagagccagatgaactggtcgaaaccggcgagctgcaacctgaccatattgtcacccctggtgccgttatcgaccacatcatcgttagtcaggagagcaaataatggatgcgaaacaacgtattgcgcgccgtgtggcgcaagagcttcgtgatggtgacatcgttaacttagggatcggtttacccacaatggtcgccaattatttaccggagggtattcatatcactctgcaaagcgaaaacggcttcctcggtttaggcccggtcacgacagcgcatccagatctggtgaacgctggcgggcaaccgtgcggtgttttacccggtgcagccatgtttgatagcgccatgagttttgcgctaatccgtggcggtcatattgatgcctgcgtgctcggcggtttgcaagtagacgaagaagcaaacctcgcgaactgggtagtgcctgggaaaatggtgcccggtatgggtggcgcgatggatctggtgaccgggagccgcaaagtgatcatcgccatggaacattgcgccaaagatggtagtgcaaaaattttgcgccgctgcaccatgccactcactgcgcaacatgcggtgcatatgctggttactgaactggctgtctttcgttttattgacggcaaaatgtggctcaccgaaattgccgacgggtgtgatttagccaccgtgcgtgccaaaacagaagctcggtttgaagtcgccgccgatctgaatacgcaacggggtgatttatgattggtcgcataagccgttttatgacgcgttttgtcagccggtggcttcccgatccactgatctttgccatgttgctgacattgctaacattcgtgatcgcgctttggttaacaccacaaacgccgatcagcatggtgaaaatgtggggtgacggtttctggaacttgctggcgtttggtatgcagatggcgcttatcatcgttaccggtcatgcccttgccagctctgctccggtgaaaagtttgctgcgtactgccgcctccgccgcaaagacgcccgtacagggcgtcatgctggtcactttcttcggtagtgtcgcttgtgtcatcaactggggatttggtttggttgtcggcgcaatgtttgcccgtgaagtcgcccggcgagtccccggttctgattatccgttgctcattgcctgcgcctacattggttttctcacctggggtggcggcttctctggaagtatgcctctgttggctgcaacaccgggcaacccggttgagcatatcgccgggctgatcccggtgggcgatactctgttcagtggttttaacattttcatcactgtggcgttgattgtggtgatgccatttatcacccgcatgatgatgccaaaaccgtctgacgtggtgagtatcgatccaaaactactcatggaagaggctgattttcaaaagcagctaccgaaagatgccccaccatccgagcgactggaagaaagccgcattctgacgttgatcatcggcgcactcggtatcgcttaccttgcgatgtacttcagcgaacatggcttcaacatcaccatcaataccgtcaacctgatgtttatgattgcgggtctgctgctacataaaacgccaatggcttatatgcgtgctatcagcgcggcagcacgcagtactgccggtattctggtgcaattccccttctacgctgggatccaactgatgatggagcattccggtctgggcggactcattaccgaattcttcatcaatgttgcgaacaaagacaccttcccggtaatgaccttttttagttctgcactgattaacttcgccgttccgtctggcggcggtcactgggttattcagggacctttcgtgatacccgcagcccaggcgctgggcgctgatctcggtaaaagcgtaatggcgatcgcctacggcgagcaatggatgaacatggcacaaccattctgggcgctgccagcactggcaatcgccggactcggtgtccgcgacatcatgggctactgcatcactgccctgctcttctccggtgtcattttcgtcattggtttaacgctgttctgacggcacccctacaaacagaaggaatataaaatgaaaaattgtgtcatcgtcagtgcggtacgtactgctatcggtagttttaacggtagtctcgcttccaccagcgccatcgacctgggggcgacagtaattaaagccgccattgaacgtgcaaaaatcgatagtcaacacgttgatgaagtgattatgggtaacgtgttacaagccgggctggggcaaaatccggcgcgtcaggcactgttaaaaagcgggctggcagaaacggtgtgcggattcacggtcaataaagtatgtggtagcggtcttaaaagtgtggcgcttgccgcccaggccattcaggcaggtcaggcgcagagcattgtggcggggggtatggaaaatatgagtttagccccctacttactcgatgcaaaagcacgctctggttatcgtcttggagacggacaggtttatgacgtaatcctgcgcgatggcctgatgtgcgccacccatggttatcatatggggattaccgccgaaaacgtggctaaagagtacggaattacccgtgaaatgcaggatgaactggcgctacatagtcagcgtaaagcggcagccgcaattgagtccggtgcttttacagccgaaatcgtcccggtaaatgttgtcactcgaaagaaaaccttcgtcttcagtcaagacgaattcccgaaagcgaatagtacggctgaagcgttaggtgcattgcgcccggccttcgataaagcaggaacagtcaccgctgggaacgcgtctggtattaacgacggtgctgccgctctggtgattatggaagaatctgcggcgctggcagcaggccttacccccctggctcgcattaaaagttatgccagcggtggcgtgccccccgcattgatgggtatggggccagtacctgccacgcaaaaagcgttacaactggcggggctgcaactggcggatattgatctcattgaggctaatgaagcatttgctgcacagttccttgccgttgggaaaaacctgggctttgattctgagaaagtgaatgtcaacggcggggccatcgcgctcgggcatcctatcggtgccagtggtgctcgtattctggtcacactattacatgccatgcaggcacgcgataaaacgctggggctggcaacactgtgcattggcggcggtcagggaattgcgatggtgattgaacggttgaattaatcaataaaaacacccgatagcgaaagttatcgggtgttttcttgaacatcgacggcgaaggtaaccccattaatcaccagtcaaaacttttcaccagcgtcagctcgccagcattacgcatcggtacaataaatgtttcctgtttctcattgacgcttccttcatcggtgatcagcgtcagttgggcggtggttaattccgtttcgctgcgcccaccatagtagttgatatacacctgatagcgcccgtgaattggcgcgggcatggcgaaaatctcgggtccgtaccccgtcgtgacatccatatccagtgcaccactgtttttcagcacggtgttaccgtaccaggcgtgttcgccatcgggcgtaacaacgtgaaggtcgaggtcggtattgtccgtatcccagctgagaaccagccgtaaacgtgcacgaatcgttcctgtacccggcgtactgtaaaactgcattttttgtcggctttgcccatccgggctgatgacctgcacgctgttgctgccttcagtgaaaatataagggcgtgcaaaactaccatcggattcaattctctgcggcatactggcaccgttgaccaccagccggccctgctgaactttacccgccgcagcataattctttattttgccgcggatctgcgcactgatattttgatcatctgccatgttgacggagctcgccgggtaattgatgctttgactaaaactggcatcttcgccctctgccggatgccagccactgagcggtgcatcaatctcgacttcctgcacaccttcactgtgagcgacagggctaagcgccaccagtaacaacggaagaaaaatctttcgcatagcattagtccattaataattgtcgggtcagcgtttcgatatagttctcatcaagcccggtgggataaccatcaaaggccaggtgcagatactcatgggttaaatccagccgatcctgaagcgtaaagaagttacgaataaacagccgtttctgctgccgatcggtataggggaaaccactgactaaacggcaaaccgcaaacacgtctggttcgttgtaccccgtctcagcttgtaatatacgccgccactgcggcatttttttcgccagccaggctttcgctttgggtaataactggcaggtactgcgtggcgctccccagcggctaagactgttgtcgggataagcaaacgcgagtatctgatcgtaacgctctccctgccccgcctgggccgtggcttgccgccaggaaagtgtcccttcggtagcgcgactgccatgataatgaaccggatcgcctgcatagatgagatcctgcgtccaggcggtcatcgttcgcgcccccgtggtcgctgggctagcagaaacacgctgcgtggcgctgctgtcggggatggtcaggcaatcgccttcccgattggcgttttgctgtaaaaaagtgcgaatcgccacggtcatggctttcgctgcctcagggggcgtacttttcgcctcgcgatccagaactctggcaacgtactcttcacgatcgagatggctctgcaatttcagtttgcccttttcgctcagtaaggtcgtctcaccgtggctgacaaacgtaatgtggttaccattagtaaacgtcacacgatagcgcccattaagtacgccgggatttactgccgtcgtactcttttccgctgtgattttcttcagcggatagcgggcaaacagctccacctctacacattgcccactggcaacctgcgtcggcactggcaaaacccgattaagcaccgtcgcataacgggttagtaccgttttgctggtgccactgccagtaacccacagcggtgtaccatcggttaaccagccagcaaaaccaccctgacggatttcctgtttatcatcggcaaaccagctccaggttttcacccgtacccgactaccgagcatggatgcgacaccgattttcgcctcgtccagcaccacatccagtaagacttcctgagctttgttttgcgcgggtaacgtcgctaaactatcaagcaggcttttaaccgttacgctggtttctggcttcagcgtagtcagagacgctaaccacgcaggtgcctgacgctgttgccagtattgcccccacacatctgcgccaatatgcaaccgctgcggcgcaaaatagagcccacaggaacgtaccagcgcggtatcgcgcgttatgctctccccagcctgacaacaataaacctcttccggggagtttccgcgacactggtagggctgctccggttgatgggtatcctccagccaggcgtaaacatacagtttccacaaactccctaacggcgtggtgaggctgtcaggtaatgcactgactttggtcacgccactactgctcagctgatacagttgatcgtgctgcgcaccgcgcagcaccagttgtaacggcgtctcctccgcaagtgttggcagagtaaccaacgccaatagccagacgattcagcgccagttcacttatttcacctgcatcccggtccattcactccctgccgcaacactttgctgcgcaggtgcataggaacgcacataacgagcaggaggcagaacgaattgccctttttgcgagaagcgcagcaaatggcggaaagtgaccgttcccgtcagttctttcaccggcaccatataggccagttcgcccatttcatttcgcgctttttccagcaattgcccctgctgtttcgcggcgttgggtttattgaccgaaatgccccatgttgtgcgctcaacgtcggctcccggtggcagcggtacttccacctgaccgtagcgcagaactgcatcctgctcgctggtaagcgtgatttcatcgagatacagcgcatcgctgtcaatctcattgctggtcaccggttgcagaataaagctcatctcttcttcaccagggataagccgatacaactggcgttcaacggtcaccggaatgttactttgttgagccatttttgccggctcacgtcagcggacctgcacattttgcggcgataattcgtcaccaaaagagagaatgtccggcacgccctgaccaacccaacgccagtcttcgccccctccagttaacttatgtttagcccatgcgcccgcaggcgcaggcaaaacaactggaggcattgtcgccatatatttcgccagccagttcatggccagcgcgcgctcaatagtggattgctcagcggtcaaaccacttaaaatagcggccgtctgggtagcgtcgccaccgctattaagcagcacaaccgtgtgcgccagcggctgattgctgtttgccgctttatcccacgcatattgctgaacctgtggcatcaccgtggacttcaactgcgcttttttcagcaacgtcatggttaagacgtttgccaccgcatctgccagtggagactccggtgtatcgaggatcaggctatcattgatatcgcgggtgtcttcctcagagaaatcttcagttttagttccgcgccgggcgatagcttcatccaaccctttcaacaacgttttgcacggcaaattcatctcctgcgcccatgccagcaccagcgcccgatgcaataacggcatgttatctgcctgctccgcgtagctgtcgagcatatgctgccagtattccggttgttgcgttacgccgatcgcctggctggcctgccagtcggcgtaccatgcccatgccgtaaggaaggcgtcaccattgccatcttcaccccaccaggtaaagcgcgctccgggccccgccagttgcatcagccgcagacggttatcctgaatcatctgacgaatgtcgttagcggcggcactttgatgatcggcaagcgaacgccaggcgagactgagcgggatcagacggctaccggtgttgattacgccaccccacggttcatcgactaacgcatcaagattgttgcggaaaatctcctgcggcgtttcactactttgtagccggatattgctcgcctgctcgggcaacatcagcgcgttatcgccaccaccgagcatgacatttttctgctgttcaacgggccagctgttatccacaaaagacagttttgtgctaatgctgtcctgcacttgcccattttgttgcagttctgcacttaacaagccagattgctgaatattctgcgtcagcgaaatataattcgcccctttgtgcagcgtcagcgtctggcgcatctcagcgcctgcaaatttagtcaccagcgccaccggttcgttatcctgctgactgaagataaatagtcctgccgccggtttgtcgcccacgcgatacaccgttggcatactccacttcatgtagagatttttttccgaacgcagataagcacgcccctgcccgaccagcccgtcgccgttcatcccacgcgcggtgatacgccagcgggttaacgaatcaggcatcaggaacgtgaaatacgctttgccttgtttatcggttgtgagtgacggcatccatgccgcggtatccacctcttcacgccgtggacgttcaagcatttttactcgccgctcgctgcggttagttgcgccaggcgcaaccggctcgctggagagcgcctggtcgtagctgataaacgacagactggagctggtacgcacattgttacgccccagcggatagaaaaatttgccgatattcggcgcgatttctggttgcagcgcgtagatcatttcatcgaccacgcctaccgttagctgcgcagaaacaggtttacctttcagcgacgaggttaattcgacattgaccagttcaccaggctggtaatgggttttgtccgttttcacccggatatccagctggggaacggcaactttgatcccggcgttctgaaaactgtactgaccgttacgggtatacagcaccgaaaaagtgatgttaggcgcaaaggaattgctcactggaacccgggcttcatactgggtatcgtttaaacgttgtagcgttagccagtttgccggatgcgaaagcagcgactgctgttccacgcgatcgcgttccagcgtcaataatgcttcatcaattggctccggaaaggtaatcagcatcttcgcggtttcgcctggctggtacagcgttttatccgccacgatatctaccgtaccagtatgcgccgtgctgcccttaccgctgacggcatgacttaacccagcgagaattaagccgtctttatcgcgtaatgtcagattgtagttgccaggtttagcgaaattgacggtaaaggatttgccgcctgacggtagctctccgctatggctcgtgcggtcttcgagacgcaaccattcatacgtaacaggaacctgttttgaagattccagcgcggcataacggaacacaaccgactcgccgctattactgtattgtgcggcagtacttaatgagtaatgcgccagaccgcgttcaatgaggatctctttggtggtggtgacgcgatacgccgcgccgtcactggcggagacggttaacaaatagcggctcggtttatcggcggcggggagatttaacgccacatgaccgctggcgtcggacaccgtttcgctgccttccagcgacacggggaaacgtccggcataacgcaaatcgttaccgaccattgataattgctgagcgcgcaaacttaactgcacgcgggcattttttaccggctcgccatccgggtagagcagttgcagtttgccgctgaccgcttcgccagttttgaactcttttttggcgagagctaaaccaatctcgaaatgtggcttgatgtagtttgccacgcgaaaactgctgctatagacctgattgcggtaagcaagacgtaactcataacctccggctacggcattttctggcaggcggaaacttccctgcccgccattgcgcgcatccagcgtgacattgacggtttgcaacagactgccgttggcgtccagcaccgaaagcttcgccggggcgctgacgatgggggatgaatgcaacggatcgtggaactcgcggccgatcactttaacatcgacacgatcgcctgcgcgatatagcgggcgatcggtaaaaatatacaagcgggtgttgtagatttcgctttcgtagaagaagttctcggagacaaaaacgccgccttcagcatccttacccagaatgtatgaacgttctggcgatatatgttgtaactgcaaggtaccgctgtcatcggtcacaccgcgggtcatcacgccaagaccgtcagtccacaagatctctgagccgggcttcgcttcaccctgttttttacccgcggtccacaccagaagctctttgcctgacactttgctaagcgccacggtatcggaaacaaacaccaccgtcgtcgcccgatacccaccaaccatcgcctcgacgaggtacagtcccggctcttgttggccgagaggaatataaatgttacccggctgcggcgagatgaaattgctggatgcgccttccagttttaccccttgctgcggctcgaacggtttagcctgccatagtggataacggaactgtttcaccaggggatattttttcagcggggaaaactggttgttctgtacataacgggaaggtttaataatggcattgccgagctgtaattcgggtaacgcctgagtcacattctgccgtgactgagaagagaaagtacgctgcatcacgcggcgagatttgccgtaccagttatcccacagccaggttagcgtattgttcagcccgtcgcccagatattgcggttgcaccacaatgcgatgcaggtttttctgctggcgcaaaaatgccatcgggtcaggaatacgatacaggcgaacgtccacgccgccgtactcttccatctgatagcgccgataatcacgccccggcgcttccagtcgcactttcgcctcttcactgctgctaaaactgctgtcagcaagcaaaaagaatgttcccccggcaggcggcgcatagttgctggaaggaagcgaatcatcagcattagcaagccctgttcccacaagagacagggacaagcacgctgttatcgcgccagaaaatttaaacgataaatgccaatgaaattgggattggaatcgttgggtatccatcgggtgtccttccatgtcataagttgttgcagactgactgcgcgcattccgttgtcagttttcgtggcgcttccggtgtggtagatgacgtaacgccccatccagaccattaagtgctgggcatcgccctgatcgaaaaaaatcatatcgccaggcagcgcctggtttatgtcctggccaataaactggctgttgtactgaatcaaattaatcgcggtcacataggggccggttttcccgttcccctgattccagttttgcgccagttgacgctgttcaggtgttagcgtcatctctggcggcaaatactggctagataaaccgttactttttagccatttactgtcgtgaactttcagcgtctcgttcgccgcaaatcgcaccaggcccgcacaatcctgctgataccagcgtggacttggcccctggcggagctgttcttgtgcaatgcgtacaaaccaggcgcgaaacagcccggattgttcgacattcagcatttcgctatgggcaacaacacaacacagccagcaaatcagcgccagcagcccgtgcctcatagcggctgccaggttatgggtagccactgccaggcggcaccgggttccatctgggccagcttcatgacataacgcggttgttgagataaagcgtccagcttcggcattaataaagtttgtgcggcgttataaaaaaccggttcgagattcttcggcagactggtcaacgtttcgttacgcagcagtttcgctattccttgtggattgatatagagcggaacgatgccatcagtgggtattacatccaccattgccgggcgggttttattcagtgtttgcagcgcgttattaaccagcgtgtcatcgagggagaaaagcagcgttttgttttgcatcgccaggctcacacggaaaaaataatcgctcattaattgatcgggttgcgccgcctgcgctttcggatactggccgtatcgggaactcacttcgcgacgccagatttgcgcttcgccctgctgagtctggcttaccggcaaaacaccttctggcgctttgctttcgtgcgcaccaatattttgcgtaaacagtttccctggcaattgcgcctgttcggcagtgccatcaaactgaccgacaaacagcggggtttgcaatttactgtcttcataccagcacagccccgcggcaccgtctaacgccccattcagcttgtcgttttcctggctgatgtggctaagcatctcttcggcaataccgtgactatacggcaccgccacacagaagctggctccggcaggcatactgttccataccggcgtaaaatcgaaactggcatctacgctggcggattcatcatttaacgccacaaaactgtgccagccgtcgttacccatttcgaagcgtacgccagcaaaagaaggcattaaccgctggtagccaaaccccagccacctggcgctgactacgatgcgctggcgtactggcgttttttcggcagtacgctcttccaggccaaagcttgcttgccagcgttttttgccgctcaacaaatcacctgcgatcgccgtggcttcggtatcctgctgatcatctttaaacaacatatccgtgctggaaaacaccagcatcttgtcctgataagtcgcgaacatcagggcgttattgccgttatagcgcaactgataaacaggaacagtttcactatttatcttgatgctactgatttccgttttgcttaactggctgtcgctggtagcggcaaacaacaatggctccagcagtttgcttaaaccactgcgctggatcagcaccatataatgactaagatggccttgtttatcgtgccacagcgctgcctgcgcgggctgatctaagagactgctaaagagcttatctttcagcgtgagatcgtgttcatagacaatacgacgaatgctgccttcaatgcccagacgatcggcatgattctgataatagaaaacgaaatcttcgctcagaacatcgtggagaaacggaatggtgaggagatctttgggaagctggctcagagagtcgctgtcgagaaagaggtccggctcattgagatcgatttgcagattgttgtgcaccaccagcgggctcaacgttttttctggcccactgccagcatattgcaacgcccagacgccagcggaaagcagtgctattgcgccaaaacctacaagaccatagaaccgccagcctttcgccttttttcaccactcattgccacattccttgtgtatagccagccattttttacgggcacagccaaactttaccgtgccctaatacgacaaaagcccagactttgcagcctggacttttcaattcaaacaagggagatagctcccttttggcatgaagaagtaaaattattcttcttctggctcgtcgtcaacgtccacttccggagcgatttcatcgtccccttccgcggcactgccgtcgatggtatccagatcttcctcgtcaaccggttcagcaacacgttgcagacccactacgttttcatcttccgcagtacggatgaggatcacgccctgggtgttacggcccacgatgctgatttcgctaacgcgagtacgtaccagcgtaccggcatcggtgatcatcatgatctggtcgcagtcatctacctgtaccgcgccaacaactaaaccgttacgttcggtaaccttgatggagataacccctttcgtcgcacggctcttggttgggtattccgccactgcggtacgtttaccgtaaccgttttgcgttgcggtgaggattgcgccatcgccacgaggcacgatcagagagacgactttatcgccttcacctaagcgaataccgcgaacaccggtggtgttgcagcccatcgcacggacagaagactctttaaagcgcaccactttaccttcagcggagaacagcattacttcgtcttcgccgctggtcaggtcaacgccgatcagctcatcgccgtcaaccagtttgatcgccactttaccggcggtacgcagacggttgaactcggtgaggacagttttcttcacggtaccgttagcggtcgccatgaagactttcacgccttcttcaaactcggtcactggcaggatcgcagtgatacgttcgtcctgctccagcggcagcaggttgacgatcggacgaccgcgcgcgccacgagtggcttccggcaactgataaactttcatgctatagacgcgaccacggctggagaagcacagaatatggtcgtgagtgttcgccaccagcagtcggtcgataaagtcttcttctttaatacgtgcggcagatttacctttcccgccacgacgctgcgcttcgtattcagaaagcggctgatacttaacgtagccctggtgagagagcgtcacgaccacatcttcctgggtgatcagatcttccaggttgatgtctgcgctgttggcggtgatttcagtacgacgtttgtcaccgaactgttcacgaaccagctccagctcttcacggatcacttccatcagacgatcggcgctaccaagaatacgcaacagttccgcgatctgatccagcagctctttgtattcgtcgagcagtttttcgtgctcaagaccggtcagtttctgcaaacgcagatccagaatcgcctgagcttgctgttcggtcaggtagtacagaccatcacgcacgccgaactctggctccagccattccggacgcgcagcatcgtcgccagcacgttcgagcatcgcggcaacgttgcccagctgccacggattagcaaccagcgcagttttcgcttctgcaggcgtcggcgcatgacggatcagttcgatgatcgggtcgatgttcgccagcgccacggctaatgcttcaaggatatgagcacgatcgcgagctttacgcagttcgaaaatagtacgacgggtcaccacttcacggcggtgacgaacaaacgccgcgatgatgtctttcaggttcatgatcttcggctgaccatggtgcaatgccaccatgttgataccgaaagaaacctgcaactgggtctgggagtagaggttgttgagcacaacttcaccgaccgcatcgcgtttcacttcaatcacgatgcgcataccgtctttgtcagactcgtcacgcagcgcgctgatgccttccacgcgtttttcttttaccagttccgcaatcttctcgatcaggcgcgctttgtttacctgatacggaatttcgtggacgataatggtttcacgaccggttttggcgtcaacttccacttctgcgcgagcgcggatatacaccttgccgcgaccggtacggtaagcttcttcaataccgcgacgaccgttaatgattgccgccgtcgggaagtccggccccgggatgtgttccatcagcccttcaatgctgatgtcttcatcatcaatatacgccagacaaccgttgatgacttccgtcaggttgtgcggcgggatgttggttgccatacctacggcgataccggaagaaccgttcaccagcaggttaggaattttggttggcatgacgtccggaattttttccgtgccgtcatagttatcaacgaaatcgaccgtctctttttcgagatcggccatcagttcatgggcaattttcgccagacggatttccgtataacgcattgccgccgcagagtcgccgtcgatagaaccgaagttaccctgaccgtctaccagcatataacgcaggctgaatggctgcgccatgcggacgatcgtgtcatagaccgcgctgtcaccatggggatggtatttaccgattacgtcaccaacgacacgggcagattttttataggctttgttccagtcattgcctagtacgttcatggcgtaaagtacgcgacggtgtaccggcttcaggccatctcggacatctggcagcgcacggccaacaatgacgctcatcgcataatccagataggagctcttcagctcttcctcaatgttgaccggtgtaatttctctcgcaaggtcgctcatctaaccgctatccctctactgtatcccggattcaaaggtcgcaaattataacacagccgcgcagtttgaggtaaacctatacgctttattcacatccaatgcctgatatactcgtttgtcttgccaattacggagtagaagtgccaatgaatgccgaaaaaagcccggtaaaccataacgtagaccacgaagagatcgctaaatttgaagccgtcgcctcccgctggtgggatctggaaggtgagttcaaaccgctgcaccgcattaacccgctgcgtctgggctatattgccgagcgtgctggcggtttatttggcaaaaaggtgctcgatgtcggttgtggcggcggcattctggccgagagtatggcgcgcgaaggcgcgacggtgaccggtctggatatgggctttgagccattgcaggtggcaaaactgcacgcactggaaagcggcattcaggtggattacgtgcaggaaaccgtggaagagcacgcggcaaaacatgccgggcagtatgatgtggtgacctgcatggagatgctggagcacgtccccgatccgcagagtgtggtcagagcctgtgcgcaactggtgaaaccaggcggcgatgtctttttcagcacacttaaccgcaacggcaagagttggctgatggcggtggttggtgcggaatatattttgcgcatggtgcccaaaggcacgcatgatgtgaagaagtttattaaaccggcagaattgctgggctgggtggatcagaccagtttaaaagagcggcatatcactgggctgcattacaacccgatcactaatacttttaaactcggccccggcgtggatgtgaactatatgctgcacacgcagaataagtgaggttgatgtttggccgcgccaatgcctgatgcgacgcttgccgcgtcttatcaggcctacaaatgctccccgtaggccggataaggcgtttacgccgcatccggcaaccgtgccgactagacagtgattaccatttcaccgtcatgctcaaaaaccctgccgtctgggcaaaatcatcactccctttctgccacgccacgctgccgcgcagggacactcgctgactgatattgcccgtgactcccacttttatttcaccccgttgcttcaccgcatcgtcactgatagtgctgccatcctcttcaatttccgtgctatggggatcgtgataataattcagatctaatgttggtatgacatgaacagcggtacgccattcgctgtgtaaacccagccgcgtctgaatatcatcaccctggctttgactcacgcgcgcacggttagcggcggtaaaatcatcctgctgcacgccctgataaatcacctgcgcctgcggttcaatcaccacaccacgccccggtaaccactgataccccgcctccaggctggcgataatcccgctgctgtggtaatgatctgtgccatcttcttgttcggaaacatcattgctaaaccacgcgtattgcagccagctatccagccaggccccttgcttctgattaccgtgctgaaaccagctacttgtcagcccaacggcataaccgtggttctggttatcggcgcgagttccggtcatattgctgcggctgtcgccctggttatcgctgtagccaccaacaatcccaagcatccactcgccatccgtgccccagcgcccgctaaacagatcgccgctaagttgcaccgtagaagtgtcttcatgttgagccagttgccccgctgctgtgtaatgataatctccgccgataacacgtaaattcagcgtctgaccatcgccacctgcgtgatcgcgtcgctccatcataaacgcctgatttgccgcccgcaggttattaagataaccgccaactttggcattcaacaccggctggtaagcaggcgtaggttccgggtcgggtgttggatcaggatccggcgtgggatcaggatcgggagtcgggtctggatcaggtgggcttggcggcgttacttcttggcttcgcagataccagtcgttgttatcttccaccagcgtgtagtcatacgctcccatattgacgtagccgctgcctgccagactgaactgcgcattgttttgaaactgcgtgggatcagctgcgaaatcaaccactttaatgcctgtgcttgtcggctcaccaatccctgtaatggagttaaccaccacagttgtgttgccagcagtattaccgttcatcaccaattgatcgcttacgctgtcatcgccgtttaattcgctatcgagcagtagcgtaccgccgccggtataatcaccgtttaccgtcagcgtatcgccagcgacgccattttgcaggctaaccgcaccggacgtattggtcagattgccattaaccgtcacgttggaaagataagtcaggctgtcagtttcaaggttggtattaagctcacctgtcaacgtcacaccatcggtggcattcaccagcgtcccatcgccgttaaatagactggcattaagggcgacggaagtatcctgcccggtcaggcgcaaaaccgtaccatcgctgatgtcgatagtgccgctggaaatagcatcaatactctgaatatcctgatccgcgccagtaacgaacgttgccccatcaccaacccacagactgctagcataaggaaggatatcagcaacatcacctttcagggtgccttcttcgacacgtaccgcgctctgcgttgtaccgctggcggtcagctccagtgtaccagcccccgttttagtcaatgtgctaccctcatcctgatgctgcccgctgctgtcagccatcagtgcgccccactgcgtgtctacccccgcatcaactgccacttcaccgtcggcgcgcatttcaatatcacgtccgtggcctgccgcatcactacgcgtgtcaacgtcggaggtaatctccatcacgctttcttgttgcttatcggtaaagataacctggcggttatagtgggtatctccaagctggctgttgtcgctcaccatcagcgtaccggaggcgatttgtgttgtgcccaaataactattattgtttgccagacttacctgcccgtcgctcgcatcgaccaccacgtagacgccatctttcccgtcgccgccgatatgcaaattgtcgccacctgcaagatctaccacatcctgactgccgataaccgttccgctgctgccactgacttcaaggccatcgttgtaacttgtgccgctctgccaggtggagaaatcagagagatcgagcacaccgccgtttaacacgatgctctgcggatcgtcctggagagcggtaagatctgccgcgtcgccttccaggctaagcaccgcaccatcatcaacgactatatcgccggttagcgccatgctctgcgcccctgccagcacgtagctgccgttttgcgcaatggtgagctgaccagcaccttcgatgatgccagcaaaactgccctgattaacagtaacgttgccaccagcatcgatatttaaagtgccattctgaaagcccgtcaatgcgtgcacaaaagtttgttgggtgctgccaacgtttagctcagcctgattctgatactgatcaatactccctatcgtcagaccgtagcagtcttgcggatcgtcctggcaatgcgtatcgccgacattcatcagggagttgctgcggcccagggtaacttcaccgttttcaatctgcatctcaccagtaaagtcattgttatctgcattaagtaccagatcgccggaacctgttttggtgattaacccggtaccagcaatagagtcaacagctccgtcattctctgtattgccaataaccagcgtttttccgtcggcaatatcaaaggtaacttcacttaagccgagatacataaagccacccgccgcagaggaaggaccatctccatagcctgctgcgctattgttctcatcgactaacacgcctccgttctggctgtagctgtcatcaacagaaatatcaataagatagggagccgtcacgctattggtatatatcgccccgccataaccttcggcagtgttatttgtaaaggcagtgttatttactatcgtataaccactaggatgcttgctgtcgctattattatcggtaacatcgattgccccgccatcgccatcactgtaacttgtacttgtatatgcctggttgttatcaaaaataacatcacttaaataaacgtcattattaatggtataaattgcgccacctttgccatcattagcgatgttattgcgaaacatggcgttagtgacacgtaaatcgacggcaccagtatcgttagtaccagaagaatagattgcgccaccatagccgcctgcgacgttaccggaaaaaataacatcagtaagattcagcgtactgttttctttagcaaatatggccccgccgttattatattctcctgtaacggtgttattggcaaacagagtcattccagtttcattttctggtaatagactaaattccgctccttgttgcaaaaatacggccccaccgctggcgttattggtcatatcgctaaaaaccagccattgcccatcagcgatactccagtcctgcgtaatgccactaaggctttgcctgctggcctgacaactcgctttgacatcatatccctggcaactatcagtgaccgccgcgacaccgttagcagagaaaagagatgcaatcatactcgggagtaaagataaatactccttgcgtagaaagataatccgcatattaatctaaccatcattttctataagacggcgtatttaatcgcattatacgatatggaatatctttcttttgtaaattgttcaacccggtgcaatggctattttgttattatttgatgaataatatcagtgcgtcataattcaagttaataaccttcagggatatcagttatatttaaactaaattaaagtcatgaataattttcttataatataaggtaaattaacaaaatggcttagcatttaacaataaccgaatagaaaacaaccatttcgccatcaacaatctcttacattcgcttatatattgaccacaactgatacatcagattatgtgatgactcgtgcttagatcaatttttgcaatcattagcaaaaagattaataagccatctatatcaatttatctaacctattatgccgttcaagaaatcgccgaacagttatttttaacaaatttttctcttcccattgactttcccggacaccttgtctgacctaaggtgcgcgaaagccactttttccttcctgagttatccacaaagttatgcacttgcaagagggtcattttcacactatcttgcagtgaatcccaaacataccccctatatatagtgttctaagcagcttcccgtactacaggtagtctgcatgaaactattgcggaaagaattccaaaaacaggtacgacatacatgaatcagaatctgctggtgacaaagcgcgacggtagcacagagcgcatcaatctcgacaaaatccatcgcgttctggattgggcggcagaaggactgcataacgttagcatttcccaggtcgagctgcgctcccacattcagttttatgacggtatcaagacctctgacatccacgaaaccattatcaaggctgccgcagacctgatctcccgtgatgcgccggattatcagtatctcgccgcgcgcctggcgatcttccacctgcgtaaaaaagcctacggccagtttgagccgcctgcgctgtacgaccacgtggtgaaaatggtcgagatgggcaaatacgataatcatctgctggaagactacacggaagaagagttcaagcagatggacacctttatcgatcacgaccgtgatatgaccttctcttatgctgccgttaagcagctggaaggcaaatatctggtacagaaccgcgtgaccggcgaaatctatgagagcgcccagttcctttatattctagttgccgcgtgcttgttcagcaactacccgcgtgaaacgcgcctgcaatatgtgaagcgtttttacgacgcggtttccacatttaaaattagcctgccgacgccaatcatgtccggcgtgcgtaccccgactcgtcagttcagctcctgcgtactgatcgagtgcggtgacagcctggattccatcaacgccacctccagcgcgattgttaaatacgtttcccagcgtgccgggatcggcatcaacgccgggcgtattcgtgcgctgggtagcccgattcgcggtggtgaagcgttccataccggctgcattccgttctacaaacatttccagacagcggtgaaatcctgctctcagggcggtgtgcgcggcggtgcggcaacgctgttctacccgatgtggcatctggaagtggaaagcctgctggtgttgaaaaacaaccgtggtgtggaaggcaaccgcgtgcgtcatatggactacggggtacaaatcaacaaactgatgtatacccgtctgctgaaaggtgaagatatcaccctgttcagcccgtccgacgtaccggggctgtacgacgcgttcttcgccgatcaggaagagtttgaacgtctgtataccaaatatgagaaagacgacagcatccgcaagcagcgtgtgaaagccgttgagctgttcagcctgatgatgcaggaacgtgcgtctaccggtcgtatctatattcagaacgttgaccactgcaatacccatagcccgtttgatccggccatcgcgccagtgcgtcagtctaacctgtgcctggagatagccctgccgaccaaaccgctgaacgacgtcaacgacgagaacggtgaaatcgcgctgtgtacgctgtctgctttcaacctgggcgcaattaataacctggatgaactggaagagctggcaattctggcggttcgtgcacttgacgcgctgctggattatcaggattacccgatcccggccgccaaacgtggagcgatgggtcgtcgtacgctgggtattggtgtgatcaacttcgcttactacctggcgaagcacggtaaacgctactccgacggcagcgccaacaacctgacgcataaaaccttcgaagccattcagtattacctgctgaaagcctctaatgagctggcgaaagagcaaggcgcgtgcccgtggtttaacgaaaccacttacgcgaaagggatcctgccgatcgatacctataagaaagatctggataccatcgctaatgagccgctgcattacgactgggaagctctgcgtgagagtatcaaaacgcacggtctgcgtaactccacgctttctgctctgatgccgtccgagacttctagccagatctctaacgccactaacggtattgaaccgccgcgcggttacgtcagcatcaaagcgagcaaagacggtattttgcgccaggtggtgccggactacgagcacctgcacgacgcctatgagctgctgtgggaaatgccgggtaacgatggttatctgcaactggtgggtatcatgcagaaatttatcgatcagagcatctctgccaacaccaactacgatccgagtcgcttcccgagtggaaaagtgccgatgcagcagttgctgaaagacctgctcaccgcctacaaattcggggtcaaaacactgtattatcagaacacccgtgacggcgctgaagacgcacaagacgatctggtgccgagtatccaggacgatggctgcgaaagcggcgcatgtaagatctgatattgagatgccggatgcggcgtaaacgccttatccggcctacggctcggtttgtaggcctgataagacgcgccagcgtcgcatcaggctccgggtgccggatgcagcgtgaacgccttatccggcctacggctcggatttgtaggcctgataagacgcgccagcgtcgcatcaggcacaggatgcggcgtaaaatgccttatccggcattaaactcccaacaggacacactcatggcatataccacctttagtcagacgaaaaatgatcagctcaaagaaccgatgttctttggtcagccggtcaacgtggctcgctacgatcagcaaaaatatgacatcttcgaaaagctgatcgaaaagcagctctctttcttctggcgtccggaagaagttgacgtctcccgcgaccgtatagattaccaggcgctgccggagcacgaaaaacacatctttatcagcaacctgaaatatcagacgctgctggattccattcagggtcgtagcccgaacgtggcgctattgccgcttatttctattccggaactggaaacctgggtcgaaacctgggcgttcagtgaaacgattcattcccgttcctatactcatatcattcgtaatatcgttaacgatccgtctgttgtgtttgacgatatcgtcaccaacgagcagatccagaaacgtgcggaagggatctccagctattacgatgagctgatcgaaatgaccagctactggcatctgctgggcgaaggtacccacaccgttaacggtaaaactgtgaccgttagcctgcgcgagctgaagaaaaaactgtatctctgcctgatgagcgttaacgcgctggaagcgattcgtttctacgtcagctttgcttgttccttcgcatttgcagaacgcgaattgatggaaggcaacgccaaaattattcgcctgattgcccgcgacgaagccctgcacctgaccggcacccagcatatgctgaatctgctgcgcagcggcgcggacgatcctgagatggcggaaattgccgaagagtgtaagcaggagtgctatgacctgtttgttcaggcagctcaacaggagaaagactgggcggattatctgttccgcgacggtagcatgattggtctgaataaagacattctctgccagtacgttgaatacatcaccaatatccgtatgcaggcagtcggtttggatctgccgttccagacgcgctccaacccgatcccgtggatcaacacttggctggtgtctgataacgtgcaggttgctccgcaggaagtggaagtcagttcttatctggtcgggcagattgacagcgaagtggacaccgacgatttgagtaacttccagctctgatggcccgcgttaccctgcgcatcactggcacacaactgctgtgccaggatgaacacccttcccttctggcggcgctggaatcccacaatgtggcggttgagtaccagtgtcgcgaaggttactgcggctcctgtcgcacacgcctggttgcaggtcaagttgactggattgccgaaccgttagcctttattcagccgggggaaattttgccctgttgttgccgggcaaaaggcgatattgaaatcgagatgtgaattggttgtagtgccagatacaacgcttatgcgtcttatctggcctacaacgattacatggcgtagtaatacgctttcacctgctcccagtccgctttggggattggctccagatatttttccagctggcggaagtcatgattaatcgctttatcgcgacgcaagcggcgacgacttttctccaggtcaagaaaaccagcttctgcattaccttctgttttcacatagatatggcgaacataacaacagccatgctgacgattaatgctatgcattttcttaaacgccagcgccactgctttcaacatggcttgccgtacttcgtcagaataagggcttactgcatgctgggcataccagtcagcaatgctgatgaaccccgccatatcttcagtcaccagcaacgctcgccattcaccctcaattttcaccgcttcaccaaaaacgatcttcggcacgatgacaccggcccgttccagttctttaattaccgcaacctcacggacaatcgttggtcggccgaacggataacgtacggaatgaaacagatgatgcgtcatgcgctttacatacagctttttgccgttgcgctcgacgcattgcaccccgctcataccattacggcgatagttaggctcttcaacccagtcgccctctgttgcccaccagtgattaaattcgtcgtactttgcactaactgccataccctatcgcctgtcatttttattaacgacaatgactataggtggttacctgaggaaaatcttaatgaaacgtgtcgtattaatgaatttcttttgccactactagcttgacaccgcttttacccttcatttgcagcgcatagattccaccagccactaccactaatagtgcgcccagcagataaaatgtgaatttaatcaggcggatacagcgatgaattttattcgacagggattaggcatcgccttacaaccagagttaacgctgaaaagcattgcaggtgaattgtgttccgttcctctcgaaccaactttctatcgacagattagcttgctggctaaagaaaagccggtagaaggcagtccactgtttttactacaaatgtgcatggaacaattagtggcgattggaaaaatttgatatgagacaggatggcgcatgaacgccatcctgcagtaacattactctttattaagaaattttactgccttatcagggaaatcagtaaacagcccatttacacccgctttgttatacagagcatcatataactgattcacatcaggagtgtattcaggcagtttatcactccgcacggtataaggatgcactaccagtttattctgctgagcatcttgcaccatgccagtgagtttgatattacccggctggcttgtctcctcaatcaacatatggtaatccggaccaataccatctgcatattccgccacctgtttcatggcacccggcttaaacatccagtcgtagttgtaattaacccagcttccatccggctgtttctgctgcgtttcattccagtcggtataggcaatcagctgtaccagattgagctccatgcccattttgggttccagctcattcttaatacgcttcagctcatcagcatcaaaacattgcaaataaactttatcgtctttaccggtgtaaccatatttcttcagcacttccagcgtttttgccgcaatatccttcccttcctgatgatggaaccacggcgctttgatttctggataaataccgatatttttcccggtagagtgatttaacccctgaacaaattcaatctcttcttcaaaggtgtgcacccggaagtcggacttacccattgggaaacgccccggataagtctgcacttttttaccgttttcaatatcgaaaccttcggtaaatttcaagctcttaatttcatccagcgtgaaatctatcgcgtagtaacgaccgtctttgcgcgcccgatccgggaaacgatcggcaacatcagtaacacgatcgaggtaatggtcatgcagaacaaccagattgtcgtctttggtcatcaccaaatcctgttccagataatccgctccctgcgcatacgccatcgcttttgctggcagcgtatgctccggcaaatatccactggcaccgcgatgggcgatgactattttttcgttgctgtccgccgccattgcactgcttcccatgactatagtgctcatcatgatcgccatgctaaggtttttcagcgtcaatttcatgccattagcctccgttgcgttcttgcagtaattgttcatggcgacgtttttcgccaatcatcacaacaatcaacaagataaccgccagaatgctgccgccaatcattaccataaagccgccatcccagccgaagaagtccacggtgtagccaacaatcgcgctcgccgccacgctaccgcccaggtaaccaaacagcccggtaaagcccgctgccgtacctgccgcttttttcggtgccagttccagcgcatgcagaccgatcagcatcacaggaccgtagatcaggaagccgataacaatcatacaaatcatatcgacggttgggttacctgccgggttcatccagtaaacgatagtcgcgatggtcaccagtgtcataaagaaaacgccggttgccccacggttgccacggaagactttatcgttcatccagccgcacagcagagtgcccggaatacctgcatattcataaaggaagtaggcccaggaggatttatctagcgcgaaatgcttaacctctttcagataagtcggactccagtcgaggatgccgtaacgcagcagataaacgaacacgttggcgatggcgatataccacagcagtttgttcggcagtacgtactgcatgaagatttgcttcgccgtcagctcctgttccgctttttcgttatagtcgtccggataatcatttttgtactcttcgatcggcggcaagccacaggattgcggggtatcgcgcatcatcgcaaaggcgaataatgccaccagaatggcgcagaaagcaggcatatagagcgccgcatgccagtcattgaaccaggccatccccagcaggaacagcagcggcggaataccaccaccgacgttgtgcgcacagttccacacactcacaatgccgccacgttctttctggctccaccagtgcaccatagtacgaccacacggcggccaccccatcccctggaaccaaccgcagaggaacaacagtacaaacatcaccgcaatgctgctcgtcgcccatggcacaaagcccataaacaacatcactgccgccgccagaatcaaacctgcgggcaggaaaacgcgcggattgctgcgatcgcttacgctacccatgatgaatttgctaaatccataagcaatgctgatcccgctaagggcaaaacctaaatcaccgcgactgaatccctgctcaaccagataaggcatagcaagcgcaaagttcttacgaaccaaatagtaagccgcatagccaaagaatatccccaggaaaatttgccagcgcaatcgacgataagtcggatcgatctccgcggcaggtaagcgcgctttgtgtggcgctggtttaaaaatactcaacattgatagcctccgtggcccgtggtcttatttatgattaacagcctgattcagtgagagaacctgccgtttcttgagttgccgcgatgttaagaaaacattcataaattaaatgtgaattgccgcacacattattaaataagatttacaaaatgttcaaaatgacgcatgaaatcacgtttcactttcgaattatgagcgaatatgcgcgaaatcaaacaattcatgtttttactatggctaaatggtaaaaaacgaacttcagagggataacaatgaaaactcgcgacagccaaagtagtgacgtgattatcattggcggcggcgcaacgggagccgggattgcccgcgactgtgccctgcgcgggctgcgcgtgattttggttgagcgccacgacatcgcaaccggtgccaccgggcgtaaccacggcctgctgcacagcggtgcgcgctatgcggtaaccgatgcggaaagcgcccgcgaatgcattagtgaaaaccagatcctgaaacgcattgcacgtcactgcgttgaaccaaccaacggcctgtttatcaccctgccggaagatgacctctccttccaggccacttttattcgcgcctgcgaagaagcagggatcagcgcagaagctatagacccgcagcaagcgcgcattatcgaacctgccgttaacccggcactgattggcgcggtgaaagttccggatggcaccgttgatccatttcgtctgaccgcagcaaacatgctggatgccaaagaacacggtgccgttatccttaccgctcatgaagtcacggggctgattcgtgaaggcgcgacggtgtgcggtgttcgtgtacgtaaccatctcaccggcgaaactcaggcccttcatgcacctgtcgtggttaatgccgctgggatctgggggcaacacattgccgaatatgccgatctgcgcattcgcatgttcccggcgaaaggaagcctgctgatcatggatcaccgcattaaccagcatgtgatcaaccgctgccgtaaaccttccgacgccgatattctggtgcctggcgataccattagcctgattggtaccacctctttacgtattgattacaacgagattgacgataatcgagtgacggcagaagaggttgatattctgctgcgtgaaggggaaaaactggcccccgtgatggcgaaaacgcgcattttgcgggcctattctggcgtgcgcccgctggttgccagcgatgacgacccgagcggacgtaacgtcagccgtggcatcgtgctgctcgaccatgctgaacgcgatggtctggacggatttatcaccatcaccggtggcaaactgatgacctatcggctgatggctgaatgggctaccgacgcggtatgccgcaaactgggcaacacgcgcccctgtacgactgccgatctggcactgcctggtagtcaagaacccgctgaagttaccttgcgtaaagtcatctccctgcctgccccgctgcgcggttctgcggtttatcgtcatggcgatcgcacgcctgcctggctgagcgaaggccgtctgcaccgtagcctggtatgtgagtgcgaagcggtaactgcgggtgaagtgcagtacgcggtagaaaatttaaacgttaatagcctgctggatttacgccgtcgtacccgtgtggggatgggcacctgccagggcgaactctgcgcctgccgcgctgccggactgctgcaacgttttaacgtcacgacgtccgcgcaatctatcgagcaactttccaccttccttaacgaacgctggaaaggcgtgcaacccatcgcctggggagatgcactgcgcgaaagcgaatttacccgctgggtttatcagggattgtgtggtctggagaaggagcagaaagatgcgctttgatactgtcattatgggcggcggcctcgccggattactctgtggcctgcaactgcaaaaacacggcctgcgctgtgccattgtcactcgtggtcaaagcgcactgcatttcagttccggaagcctggatttgctgagccatctgccagatggtcaaccggtgacagacattcacagtggactggaatctttgcgtcagcaggcaccagcccatccttactcccttctcgagccacaacgcgtgctcgatctcgcttgccaggcgcaggcattaatcgctgaaagcggtgcgcaattgcagggcagcgtagaacttgctcaccagcgggttacgccgctcggcactctgcgctctacctggctaagtagcccagaagtccccgtctggccgctgcccgcgaagaaaatatgtgtagtgggaattagcggcctgatggattttcaggcgcaccttgcggcagctagcttgcgtgaactcggccttgccgttgaaaccgcagaaatagagctgccggaactggatgtgctgcgcaataacgccaccgaatttcgcgcggtgaatatcgcccgtttccttgataatgaagaaaactggccgctgttacttgatgcgcttattcctgtcgccaatacctgcgaaatgatcctgatgcccgcctgcttcggtctggccgatgacaaactgtggcgttggttgaatgaaaaactaccttgtagtctgatgcttttgccaacgctgccgccttccgtgctgggcattcgtctgcaaaaccagttacagcgccagtttgtgcgccagggtggcgtgtggatgccgggcgatgaagtgaaaaaagtgacctgtaaaaatggcgtagtgaacgaaatctggacccgcaatcacgccgatattccgctacgtccacgtttcgcggttctcgccagcggcagtttctttagtggcggactggtagcggaacgtaacggcattcgagagccgattctcggccttgatgtgctacaaaccgccacgcggggtgaatggtataagggagatttttttgcgccgcaaccgtggcagcagttcggtgtaaccactgatgagacgctacgcccgagtcaggcagggcaaaccattgaaaacctgtttgccatcggtagcgtgctgggcggatttgatcccatcgcccagggatgcggcggcggtgtttgtgccgtcagtgctttacatgccgctcaacagattgcccaacgcgcaggaggccaacaatgaatgacaccagcttcgaaaactgcattaagtgcaccgtctgcaccaccgcctgcccggtgagccgggtgaatcccggttatccagggccaaaacaagccgggccggatggcgagcgtctgcgtttgaaagatggcgcactgtatgacgaggcgctgaaatattgcatcaactgcaaacgttgtgaagtcgcctgcccgtccgatgtgaagattggcgatattatccagcgcgcgcgggcgaaatatgacaccacgcgcccgagcctgcgtaattttgtgttgagtcataccgacctgatgggtagcgtttccacgccgttcgcaccaatcgtcaacaccgctaccagcctgaaaccggtgcggcagctgcttgatgcggcgttaaaaatcgatcatcgccgcacgctaccgaaatactccttcggcacgttccgtcgctggtatcgcagcgtggcggctcagcaagcacaatataaagaccaggtcgctttctttcacggctgcttcgttaactacaaccatccgcagttaggtaaagatttaattaaagtgctcaacgcaatgggtaccggtgtacaactgctcagcaaagaaaaatgctgcggcgtaccgctaatcgccaacggctttaccgataaagcacgcaaacaggcaattacgaatgtagagagcatccgcgaagctgtgggagtaaaaggcattccggtgattgccacctccagtacctgtacatttgccctgcgcgacgaatacccggaagtgctgaatgtcgacaacaaaggcttgcgcgatcatatcgaactggcaacccgctggctgtggcgcaagctggacgaaggcaaaacgttaccgctgaaaccgctgccgctgaaagtggtttatcacactccgtgccatatggaaaaaatgggctggacgctctacaccctggagctgttgcgtaacatcccggggcttgagttaacggtgctggattcccagtgctgcggtattgcgggtacttacggtttcaaaaaagagaactaccccaccagtcaagccatcggcgcaccactgttccgccagatagaagaaagcggcgcagatctggtggtcaccgactgcgaaacctgtaaatggcagattgagatgtccacaagtcttcgctgcgaacatccgattacgctactggcccaggcgctggcttaaactcctttctgatgcccggtaagcatgtggttaccgggcatttttgcgtacacgattccgtgcccaatgtatgcgttgcaacgcagtgaaaattcctctgaaaacgtctcgcaaaggctgaaactggcagatgtcaaaggcctgggataaccgtaatgtcgcgtcatcataaatatcaggtgacggacaaccatgaccgaaagtacaacctcctccccgcatgatgcggtatttaaaacctttatgttcacacccgaaaccgcacgggattttctcgaaatacatttaccagaaccactgcgcaagctttgcaacctgcaaaccttacgcctggaacccactagttttattgaaaaaagtttacgcgcttactacagcgatgttttgtggtccgtggaaaccagcgacggtgacggctatatctactgcgtgattgaacatcaaagctctgcagaaaagaatatggcttttcggctaatgcgctatgccactgccgccatgcagcgtcaccaggacaaaggctatgacagagtcccgctggtggtgccgttgctgttttatcatggcgaaaccagcccttacccgtacagtctcaactggctggatgagtttgacgatccgcaacttgcccggcagttgtacaccgaagcttttctgttggtggatatcaccatcgtacctgacgatgagatcatgcaacatcggcgtatagctctgctggaactgattcaaaagcatattcgcgaccgcgatttaatcggcatggtcgacaggatcaccacgcttttggttagaggcttcactaatgacagccagctacaaacactgtttaattatctgctgcaatgcggcgatacctcccgtttcacccgttttattgaggagattgccgaacgtagtccactacaaaaggagagattaatgactattgctgaacggctacggcaggaagggcatcaaattggctggcaggaaggtatgcatgaacaagccattaaaattgctttgcgcatgctggagcagggctttgaacgtgagattgtgctggcgacaacccaactcactgatgctgatattccgaactgtcattaaaaggagagattaatgactattgctgaacggctgcggcaggaaggacatcaaattggctggcaggaaggtaaattagaaggtttgcatgaacaagccattaaaattgctttgcgcatgctggaacagggctttgatcgtgaccaggtgctcgcggccacccagctaagcgaagccgatctggcagcgaataaccactaattaacacaggcccacagccgatccccatgggcctttgatatcaataactaccttttatgcgtggcccatttttgccacttttaaacatcgccagtcgttgatccagggcatcgctgtagagcatcgtgtcaacgccaacagcgacaaagttcgctccccacgccaggcattgctgcgccatatcaggagccacagccagaaaaccagccgctttacccgcagcacggatccgccgaatactggtttcaataattcgctgcacttccgggtgcccggcgttatccgggtagcccaagctcgcagaaagatccgcaggtccaataaacacgccatcaatcccttcgacgtcgaggatttcgtccaggttatccagtgccgttttactttccacctgcaccaacagacaaaggctatcgttaacttgcgccatgtaattctcaatgcgtccccagcgcgcagcccgtgccacactggccccgacaccacgctcaccgtagggaggatagcgcgtggcagacaccacctgacgtgcctgttcggcagtatcgaccatcgggatcagtagagtttgcgcgccaatatccaggacttgtttaatcagcggtttactgccttccaccggacggatcacgggttggctggcatagggcgctaccgcctgtagctgatgataaagatcctgaatggtgtttggcgcgtgctccccgtcaatcagcaaccagtcataaccagaagtggcggcaatttctgccatataggcagtcgtactgcttaaccacagaccaatttgcacttcgcccttgcgtaaacgttctttaaagggattgcttaataatgcgttcatcgtgttccttaacctatttaatgatgtgccacgtcggtctgcgcaacagtgcgatttacacgcagagtgaaaataatcaggctaccgatgaccgccaccgctgccagcgtcagtaatcccgccgcatcgctggcaaataacgtttctgctttcacgcgcaggatcggggcaataaacccgcccactgcaccaaacaggtttacaaaaccaattcccgcagccagcgccgtaccggaaagcagttgtgtcggcatcgtccagaacactggctgcacggcaataaacccgatagctgcaacacacagcgctacgatcgccattactggagaaagcagcccggacagaccaataccaatgcccgccgccagtaatgtcagcgctgcgacattacgccgttcgccggttttatcggaatagcgcggaataagccaggtcccaaacaaggccgcaacccacggaatggcggtgaccacgctcgctgtaaagcccacttttgttcccagcaatgccgcaacctgggtcggcaggaagaaaattaatccgtaaaccgccacctgaatggtcaggtagataatcgctagttgccagactcggccattacgcagcgcatcgctcagccgagaagtcactttctgttgttcttcacttgccagttgattgataagcaacgttttttcttgtttactcagaaaacgtgcctgctccggtgtgtcatcaagccaaaagaatgtgaataccccagcaccgactgccaacaatccttcaatcacaaacatccagaaccagccgggatgccccataaatccatgcatctccaacagcgcgccggaaagcggacttcccagtgttaacgccagcggtgcgcccatatagaacagccccataatgctggcgcgattacgctgcggaaaccattggctggtgagataaatcataccagggaaaaatccggcctccgcagcacgaagcagagtgcgaactatcagaaatttcgcttcagtatcggcccatgccatggctgcgctaagaaatccccacagcagtgttgtcgtaccaatccaggttctggcccccagtttgcgcatcaaaagattcgccggaacacccagaaacgcatataccacaaagaaaatgcctgctcccagcgcataagcttcattactcaacccggtatcaatctggtaggtctgtttggcaaaaccgatattgctacggtcgagaaacgccagcacatacagcgccaacataaacggaattaaacgcacacggtttttcttcaccacggcgtcaagcaaagcggtgctcataaaaagctccttagaatatgtgggcgttaccgttgtcacagcaacgcccggagtgattagtggctgtaggggcgtttcaaattgcagtcatgattgagttcgacgccaaaaccgggtttatcaagcacacttttatgaatacgaccattcaccggaaccggctcattgagcagaatcgggtcaaactgcggacgcatcgtactacaatccgggctggtcatcaggaattcgctgaatggcgtattggtgaaggtgatcaccgcatggtgagagtaaacagagctaccgtgcggcaccaccagttgccccctggatttggcgattgcggcaatttccaccagcgtggttaaaccaccgcaccagccaacatccggctgcataatgtcgataccggtttcactaagcgtacgaaaagattgcagtgtgccgtggtgctcaccgctggtgaccatcattccgactggcgcgttgcgtttcagttcgcgataactttcatactgctgtggcggcaggcactcttcgatccatttcaggttatagggcgcgcaagcgtgggccagtttggtcgcatagttcacgtcctgactcatccagcagtcgagcattaaccagaaatcctcaccgcatttttcacgcatatccgcgaccatagcggcatctttgcggatccccgcatcgccatcatgtggcccccagtgcgtcggcattttgccaccgataaagcccatctcttttgccagatccggacgcgcacctgtggcgtagaactgaatctcatcacgaacagcgccgcctaaaagtttataaaccggaagcccgaccactttgccgaacagatcccacagagccagatcgacacaagaaatcgtattcatcaccaggccaccagagccggagtaatacagggtggcactgagcatttgatcgtggatcagtttgatatcactgacacatttaccctcaatgaaacggttaagatgtttttcgacaataaaacagcccatttcaccggctgtgctaacggcgaatccggtctggccgttttctgcttcgacttcaacaaccaacgtgccaagaacgttaatgccaaaactctggcgactctgctcgtaatcgcggtatttactcatcggggtggcaatatgatcgtctatccagtgattcgccccctggtcgtgataatcaccgccgccagcgcctttttctgctgtcgcaccgccagtaaaccaggcgcgaacctgtttaatttttggtagggtcatgatgttctccattgttaactggcttgtaagtcaaagggacttttccatcccaacagacgactaatatccctggcgcaggcaatggccttgcccgccagataatcacggtattcttcattgatttgtaagcgggtaccgaccacgctgatcgcagcggtaagctcgttattggcgttaaacaccggcgcagcgacacaacggacatcggcgtaatcttcgccgttgtcatagctccagccctgacggcgaatacgcgccagttcttcgtgaagttgctgtggatgagtaatcgttgtgggtgtcgcctgctcccagaccagcccttcgataatactttgctgtaccgctgcaggttgccaggcaagcaggcatttacctattccggagcgataaaggctaaggctttttccttcatgggaacgcacgctgatagtggcactactctccactttcaaaatgtaataagcgctgccgttatcaataatccccaggtgacataacagcccggtggtatccatcagttgcgtcaaacgcggtcgagccagttcccggagatccatcttgcttaacgcatgaccggaaagctccaccagcctggtccacaaacaaaaattttcctggtgatcaaggctaagaaaacgctgacgcctgagttcattaagcagcaaataggccgtgcttttagggattcccaatgtgtcaatgatcgtcgcagcactacaggggccaatgcgggcaatcaaattgagaatatcaatagcccgtgtcagggcgggaactttgctactttccaacatactggactccagtcttagatactggaatcagtctcgttgctcagggggagtaaaattgtgaagcgcatcaaatcccgctcctcgtccagcagactggagaaattacgcacaaatttgtgaatcagcgcacggattttttcttattgagtacaacaggttggacaaattttgccggagggggaatgtgccggtgcagtaaaccggcacagagtggcggaatcagacagataaggtcatggactcaacaacctcaatccagccatgctcactggcgatatcctggccgtttaaccaacggcgcagcatattcagtgccatcattgcgcacacttcctgacggatagccaggctgtagcgcgtagtgctgaaacgcacacgcagagcgaaagtgccgtctggcgtggctagcgcaaagttgagatgctcgttctcgaaaccgctaacagccagtgccagcccggcaaaatggttggcccgccgttctgtaatccagtgcgcagtttgcgccagggtttcctcctgactaggaaccacttcacacgccagcaatggagcacctgcgcgagaaagttgcaaagccaataaaccaccggtgaattgctcgctcaacgtcaggctgaactggcggttttgcaattcgcgactgatctgcgcgggcagtccttcagtgccttcgaaaatcacgctctgtccggcaacacgtttaacatccagccacagtttttccatcgcctgttgctcgcttgccggtccggtgagtttcagttcgatgataggcatactggagcgatagcccattgttacgcccggcggcagttgtagagtgtccaggctttgtgccagatcgctttcgctacgaccaaaagtagtcaaacgcagacaaaccggcggctgcggtaaagaaaaacgctcgcgcaggcgcggcaggatttcgtgctcgaccatcaccttaaattcactcggtacgccgggagtaaagaacatcaggcaacgattaagctgcacggcaaaaccacaggcggtgcctaccgggttattgataaattcagcactggcaggcagctccgcttgtttacggttgctcggtgccattactcgtccacgttcgtggaaatagcgttccatctctttgagccaggcttcatgcagcaccaggccttcaccttttgctgtcgcagcggcgagtgcgcttaaatcatcgctggtcggtcccagcccgccgttaacgatcagcacatcggcgtgctgactacgttcgcgaagaatggtgactaagtcatcaaggttatcccccaccgtattgcggcgagataatggcaacccctgatgaaagaaaaaatcggccagccaggcagcgttagtgtcaacgatttgcccgtgtaacacttcatccccggtggataacatttccacttttaacatggttatctcctgcttttgttatcgaatcactataacgcaaagggagataaggcgtagtaagaaactgaatggcgcgacagaatgccgcgccggaagggatcagaaactggcgttaaccccaacatacgggccgtcagccacggcgttgtcgcggttaccgtctttaccgctcagattcaggtagcgataacccgcctcaatactgactggacgcataatggtgtaacgcgcgccagcattcgcttcttcataactttgaataccgctggagaggctatccggagagtagtaatactcgccaaacaaacggaagctgttgccaattttccactgcaaaccacctcctaccgctgcggcataaccttcatcgccgtaattcgggttggtgtaaacgccttttccgccaacggtcgccattaacggcccgagaggcagattcaaccccagccccacgccagcgacatcaccgtcgtcgtcgttatgtgtccagttaccgcttaacgccaggcccgtcgtttcagtcccaaaaccgacaccaatattggtgtattctttacccgcctgaccgctgatgctcattgcattgacgcttgcagaaaccaacagcattccggccagacctgctagcgcaatttttttcattatcccctttcccacaagcaattaatcaaaattcccaaagctgcgggattgtactgcctggcacagaggattcaatgagcgaaaaaaaggatctagtcacttattgtaactaaatacttcttaaataattaaatgccgaaaaaataaacacactttatcgatacacacaaaaataataataagtacagttatcatcgcaaaagagattactgtcactttcacatatttgtgagttaccgtattctcatggtttctttttatttataaggaatatccctgtgcgacaacggactattgtatgccctttgattcaaaatgatggtgcttatttgctgtgtaaaatggccgacgatcgcggcgttttccccggtcaatgggcgattagcggtggcggcgtggagcctggcgaacgaattgaagaggcactacgccgcgaaattcgcgaagaactgggagaacagctgcttttgacagaaatcacgccgtggaccttcagcgatgatattcgcaccaagacgtatgcagatggtcgcaaggaagagatttatatgatttacctgatttttgactgcgtttctgccaaccgagaagtgaaaataaacgaagagtttcaggactacgcgtgggtaaaacctgaagatctggtgcattatgatttgaatgtcgccacccgaaaaacgttacgtttgaaaggtcttctgtaacaatgatgacagccattactggctgtcagattgaaaatttagtggttaacgaattccccatccagataaactttgcctttttccacatgcatgactaaaccatccagataatcaggtttaaatgtcgcgtcacgcttatctttagcaatatatgtcaggcaatgattatgggtgaaaataacgatatttttatcaggcgctttgctttgtaagtccttaattgcactataaatctcattaccgcactgaagaagtcgtttatctaccgtcaattttttacccgcactaaaccaggtagcgctctgaatggtccggacggtattactggaataaagatcgaaatcagggatatcagcactaaaagcgttgcccagttcacgggcatcctgggtacctttaaccgtaatacctgttttatcactcaagcattgattggtactacggtcgcaacgttcagcatgacgaaacaaaacgacaaccgggtgctgctgtgccagtctggccagtgttttattgtcgatacgtggcaaaccattgctactccaggcggcatgagtacccagtccggcaattgcagcgagcgccagtaaaatgatgatatattttttactcttcaagctagagcggcaaaaagctaacacgtaaactccacctatagacaagcgcaaccagacaattaccgtgaaattgagctacatttctggcgataattcgcagttggtgtaatattaaaaatcctacgatgtcggcaaaatgcctcaaaattttgccaaatgcaaagcctaaataagaaaaaatataaaaatttcaatatttacgtctaatattagtttcttaaggttaagttaatattctatccttaaaatttcgctccaaatggcaaaatatacacaacactctttatagcaaatataagtggacaggtattcaatggcggaaggaaaagcaatgagtgaatttttgccttttagccgaccagcaatgggcgtggaggaactcgctgcagttaaagaggttctcgaatccggttggatcacaaccggtccgaagaatcaggcgcttgagcaagctttttgccagttgacgggaaatcagcatgccatcgcggtcagtagtgccaccgccggaatgcatatcacgctaatggcgttgaaaattggcaagggcgatgaagtgattacgccttccctgacctgggttagtaccctcaatatgatttccttgttgggtgcaacgccggtaatggtggatgtcgaccgcgatacgctgatggtcacgcctgaagctatcgagagtgccattacgccacgcactaaagccatcattccggtgcattatgccggtgcgccagcagatattgacgccattcgcgccattggcgaacgttacggcatcgcagttatcgaagatgctgcccatgccgtcggtacgtattacaaagggcgacatattggcgcaaaaggtaccgctatttttagttttcatgccattaaaaatattacctgtgctgaaggtggcctgattgtaactgataatgaaaaccttgcccgccagctacggatgctgaaatttcacggtctgggtgtcgatgcctatgacagacaaacctggggccgtgcaccgcaggctgaagtcttaacaccgggctataagtacaatctgaccgatattaacgccgcgattgccctgacacagttagtcaaattagagcacctcaacacccgtcggcgcgaaattgcccagcaatatcagcaagcactggcagctctcccctttcagccattaagccttcccgcctggccgcacgttcacgcctggcatctgtttattattcgtgtcgatgaacaacgttgtggtatcagtcgcgatgcgttgatggaagcgttaaaagaaagaggcattggtaccgggttacatttccgcgccgctcacacacaaaaatattatcgcgagcgttttcccacgctgagcttaccgaataccgaatggaatagcgaacgcatctgttctttgccgctgttcccggatatgactaccgccgatgccgaccatgtcatcacagcccttcagcaactcgcaggacaataagccatgtttgaaatccaccctgttaagaaagtcagcgtggttattcccgtttataacgagcaggaaagcttaccggaattaatcaggcgcaccaccacagcctgtgaaagcttggggaaagagtatgagatcctgctgattgatgacggcagtagcgataattccgcgcatatgctggtcgaagccagtcaagcggagaacagccatattgtgtctattttgcttaaccgcaattacgggcaacatagtgcgattatggcgggattcagtcacgttactggcgacttaattattacccttgatgccgatctccagaatccgccagaagaaatcccccgcctggtggcaaaagccgatgaaggttacgacgtggtagggactgtacgccagaaccgccaggacagctggtttcgtaaaaccgctagcaagatgattaaccggcttattcagcgcaccactggcaaagcgatgggtgattacggttgtatgctgcgcgcctatcgccgtcatattgtcgatgcgatgttgcactgccatgaacgcagcacctttatcccgattctggcgaatatcttcgcccgccgtgccattgaaattccagtacatcatgccgagcgtgagtttggtgaatccaaatacagttttatgcgcctgattaatttgatgtacgacctggtgacctgccttaccacaacgccgctacgtatgctgagtctgctcggcagcattattgcgattggaggttttagcattgcggtgctgctggtgattttacgcctgaccttcggaccacaatgggcggcagaaggcgtctttatgctatttgccgtgctgtttacttttattggcgctcagtttatcggcatgggattactcggtgaatatatcggcaggatctacaccgatgtccgcgcccgcccccgctattttgttcagcaagttatccgtccatccagcaaggaaaatgaataatgaaaaccgtcgtttttgcctaccacgatatgggatgcctcggtattgaagccctgctggctgccggttacgaaattagcgccatttttacccatactgataatcccggtgaaaaagccttttatggtagcgtggctcgtctggcggcggaaagaggcattccggtttatgcgccggataacgttaatcatccgctgtgggtggaacgcattgcccaactgagcccagatgtgattttctctttttattatcgccatcttatttacgacgaaattttgcagctcgctcccgcaggtgcatttaatctgcatggtagcctgttaccaaaatatcgtggtcgcgcgccgctgaactgggtgctggtcaacggtgaaacggaaactggcgttacattgcaccgaatggtgaaacgtgccgatgccggggccattgtggcgcaactgcgcattgccattgcgccagacgatatcgctattacgctgcatcataaattgtgccatgccgcgcgccagctactggaacagacattacccgccattaaacacggtaatattctggaaatcgcccagcgcgaaaacgaagccacctgttttggtcgcagaacgccggatgacagtttccttgaatggcataaaccggcatccgtactgcacaacatggtacgtgccgttgccgatccgtggccgggtgccttcagctatgttggcaatcagaaattcaccgtctggagcagccgtgttcatcctcatgccagcaaagcacagccggggagcgtgatttctgttgcgccactgctgattgcctgtggcgatggcgcgctggaaatcgtcaccggacaggcgggcgacggcattactatgcagggcagccaattagcgcagacgctgggcctggtgcaaggtagtcgcttgaatagccagcctgcctgcaccgcccgacgccgtacccgggtactcatcctcggggtgaatggctttattggcaaccatctgacagaacgcctgctgcgcgaagatcattatgaagtttacggtctggatattggcagcgatgcgataagccgttttctgaatcatccgcattttcactttgttgaaggcgatatcagtattcattccgaatggattgagtatcatgtcaaaaaatgtgatgtcgtcttgccgctggtggcgatagccacgccgattgaatatacccgcaacccgctgcgcgtatttgaactcgattttgaagagaatctgcgcattatccgctactgcgtgaagtaccgtaagcgaatcatcttcccgagtactagtgaagtttatgggatgtgtagcgataaatacttcgatgaggaccattctaatttaatcgtcggcccggtgaataaaccacgctggatttatagcgtaagtaaacaattacttgatcgggtgatctgggcctatggcgaaaaagagggtttacagttcaccctcttccgcccgtttaactggatgggaccacgactggataaccttaatgcagcgcgaattggcagctcccgcgctattacgcaactcattctcaatctggtagaaggtagtccgattaagctgattgatggcggaaaacaaaaacgctgctttactgatattcgcgatggtatcgaggcgttataccgcattatcgaaaatgcgggaaatcgctgcgacggtgaaattatcaacattggcaatcctgagaacgaagcgagcattgaggaactgggcgagatgctgctggcgagcttcgaaaaacatccgctgcgccatcatttcccaccgtttgcgggctttcgcgttgtcgaaagtagcagctactacggcaaaggatatcaggacgtagagcatcgtaaaccgagcatccgcaatgcccaccgctgcctggactgggagccgaaaattgatatgcaggaaaccatcgacgaaacgctggatttcttcctgcgcaccgttgatcttacggataaaccaagttgacctaagatcttacggataaaccatcatgaccaaagtaggcttacgcattgatgtcgatacctttcgtggcacccgtgaaggcgtgccgcgtctgctggaaatcttgagtaagcataatattcaggccagcatttttttcagcgtcggcccggacaatatgggccgccatctctggcgactggtgaagccacagtttttgtggaagatgctgcgcagtaacgcggcaagcctttatggctgggatattttactggcaggtacggcctggccaggtaaagagattggtcatgccaatgccgatatcattcgtgaagcggctaaacatcacgaagtcggcctgcacgcctgggatcaccatgcctggcaagcccgtagcggtaactgggatcggcaaacaatgatcgacgatattgcacgcggtcttcgcactctggaagagattatcggtcaaccggtaacctgttctgccgctgcgggctggcgtgccgaccagaaggtgatcgaagcaaaagaagcgttccatttgcgctacaacagcgattgtcgtggggccatgccgttccgtccattgctcgaaagtggaaaccctggcactgcgcaaattccggtgaccttacccacctgggatgaagtgattggtcgggatgtgaaagcagaagattttaacggttggttactcaaccgcatcctgcgagataaaggcacgccggtttataccattcatgcagaagttgaaggctgcgcttatcagcataattttgtggatctcctcaaacgcgcagctcaggaaggcgtgacattttgccctttaagcgaactgttaagtgagacgttgccgctcggacaagttgttcgcggaaatattgccggacgtgaaggctggctgggttgccaacaaattgcgggtagtcgctgatgaaaagcgtacgttaccttatcggcctcttcgcgtttattgcctgctattacctgttaccgatcagcacgcgtctgctctggcaacccgatgaaacgcgttatgcggaaatcagtcgagaaatgctggcatccggcgactggattgtgccccatctgttagggctacgttatttcgaaaaacccattgccggatactggattaacagcattgggcaatggctatttggcgcgaataactttggtgtgcgggcaggcgttatctttgcgaccctgttaactgccgcgctggtgacctggtttactctgcgcttatggcgcgataaacgtctggctctactcgccacagtaatttatctcagtttgtttattgtctatgccatcggcacttatgccgtgctcgatccgtttattgcattctggctggtggcgggaatgtgcagcttctggctggcaatgcaggcacagacgtggaaaggcaaaagcgcaggatttttactgctgggaatcacctgcggcatgggggtgatgaccaaaggttttctcgcccttgccgtgccggtattaagcgtgctgccatgggtagcgacgcaaaaacgctggaaagatctctttatttacggctggctggcggttatcagttgcgtactgacggttctcccttggggactggcgatagcgcagcgggagcctaacttctggcactattttttctgggttgagcatattcaacgctttgcactggatgatgcccaacatagagctccgttctggtactacgtgccggtcatcattgccggtagcctgccgtggctgggattactccccggtgcactgtacacaggctggaaaaaccgcaagcattccgcaaccgtctatttgttgagctggacgataatgccgctgctgtttttctccgtcgctaaaggtaaattgcccacctatattctttcctgctttgcatctctggcaatgctgatggcgcattacgctttgctggcagcaaaaaataatcctctggcgctgcggattaatggctggattaacatcgcttttggcgtcactggcattattgccacatttgtggtctccccgtggggaccaatgaacacgccggtgtggcaaaccttcgagagctataaagtcttttgtgcctggagcatttttagcctatgggcatttttcggctggtacaccttaacaaacgtcgaaaagacctggccttttgccgcgctttgcccgctggggctggcgttgctggtaggatttagtattcctgacagagttatggaaggaaaacatccgcaattttttgtcgagatgacacaagaaagtcttcagccaagccgctatattcttactgatagcgtcggtgttgccgcaggtctggcatggagcctgcaacgcgatgacatcatcatgtatcgccagacaggtgagttgaaatacggccttaattatccggatgcgaaagggagatttgtcagcggtgatgagttcgcaaactggcttaatcaacatcgtcaggaggggattattactctcgtgcttagcgttgaccgcgatgaagatatcaacagtctcgccattccgcccgcagatgccatcgatcgtcaggagcgtctggtgctgattcagtatcgtcccaaatgatctggctaacattagtctttgccagcttgcttagcgttgccgggcagttgtgtcagaaacaggcaacctgctttgtggcgataaacaaacggcgcaaacatatcgtgctgtggctgggactggcgctggcttgtcttggtcttgccatggtgctctggctgctggtcttgcagaacgtaccggtaggcattgcttacccgatgttaagtctgaattttgtctgggtgacgctggctgcagtaaaactgtggcacgaaccggtaagcccgcgtcactggtgtggggtggcgttcattattggcggcattgtgatcctcgggagtacggtgtaatgggcctgatgtggggattattcagcgtcattattgccagtgttgcgcaattaagcctgggttttgcggcgagtcatctgccgccgatgacgcacttatgggattttatcgcggctctgttagcttttggcctggatgcccggatactgttactcgggctgctgggttatctgctttccgttttttgttggtataaaacgcttcataaacttgcgctaagcaaagcctatgccttgctcagtatgagttatgtgctggtatggattgctagtatggtacttcccggctgggaagggacttttagcctgaaagcactactgggagtagcctgtattatgagcgggttgatgctgattttcctgcccacgacaaaacaacgttactgagttttccctgccactttacactgccgttcccactcatcggggctataactgcttgcgctgaggactttcaccgtatgcagcttttcacgattaatacaataaagcgcattctgcaaagggctgagtaaatcccccactttcacggcgaagtcactcttcacttcggcgatcatttttatcgcgccgccagcatcgcagagcataagtacatgtctgttatcttgtttattgcagcagctttttttgaccagccattccattgcattatcctgtttgctaagagttttcacatcaatttacagattaacagataaactctttatcaacggcaatggaatggcagaaatgagaagtgaaacggagggttaattattgctgacgttgcacccactcttttagcgcctgacgactaattttaataccgccgtttttcagctccggcggcagagttagccagcgcaccggttgttgaaaacgggccagcttatctttcacccattcactaagatcaacgctctcgtggtcatactccatcaccgccaccggtcgatgaccaaactccttgtcggcaacggggacgataaacacctgcaaaaccgcaggatgtgcagcaattacgcgctcgacttcttccggctgaataccctctccgccactgaagaatagattgtctaaacgtccgacaatggtcagcttgccattatgcatctcaccgcgatcgcgcgtagcgtaccagccttcgtcattaaccagactaaccagttgcccgttacgccagtaaccttctgccatactggcagcccgcagccacacttcattattaacgattttcacttcccgacccggcagcgggctaccaacgtctgccaggccgtcggcttctttcgcacacaccgtggaggcaaactcggtcagaccatagccgcaaaagcaacgaatcccctgctcgcgcgcctgttccgtcaactcgaccgggatagccgcgccgccaagtaacaccgctttcagggaaacggaactacggttaaccagcaaacgccagagttgtgttggcaccagactagcgtgagtacagcctgccagcatttgctccaatggctgtttatcacgtaccgtcatccgcgcaccagcgtataaccagcgccacataattccctgaccggagacgtgaaacagcggtaaagagagcaaccaatcatcgtgatcgccaaacggaatcaggcttaacacaccttgcgcactggcaagatgggcctgataagtatggacagcggctttcggcaaaccggtagaaccgctggtcaacgtcatactgcacagacgcgtcggctgccacgtagcggcatgtgcgccttcaaccagctgaatgtgcaggctcgttaatgccggaaacgtgttttccccatccggcaccagagcaaattgcagcgtcagattgggcagcaattcttcaagcaacggttgcggcagctgagggttcacgggcaacacccgcgccccgcattgcagtaacgccagccaggcgagcagcgtttgcggcgtattccacgcccgcaacatcacgccgctgccctcaaccaccccctgcaccgcaaatccggaggctaattcatcgacgcgagcacaaagctcgcgccagttgagttgctcgtcattaagacgtaaggcgatggtttctccccgcacttgccgccagtgacgccacggccagtcagagaagatcataacaaccgctccagtgcatcaacttccacgacaggcagcgtgctacccggccagcgacgtacctgctgcgcctgcatcagatccagcgtgtccagccctggaatggtgtccggcgttaaccaggcggcaatccgcgccagttgcgttaagcctaagctgctttcaatggaagaactgatcaccgccgtcagccccagcgcgtgcgccgcctgtacctgctcgcgtactttttccagactgcccgtgagcgtgggtttgataactaccgcgcgcacgccctcttcagccacaaaggcaaaatccggctcgcgcaggctttcatcccaggcaatggcaatgccggtttcacgggcaaacgctcggctatcatcgcgggttttgcacggctcttcgagaaacgcgatgcggtcgcgataatccgggttaacgtatttggcaaactgctgacctttcagcggtgtccaggcgcgatttgcgtcaagacgcaaatgcagatccggaattgcctccagcaacagattcaccaccatgccgtcgcgcaccgcttcgtacaatcccactttgaccttcgccactttctcgcctggcatatctgcaagtttgaggatcagatcgtccggatcgccattacacagcggtgccgcacggtagttggctgcttgcggcaacgtatctgtcagttctgccaatgcacagcttacgccaaaggccacggaaggcatctgcggtagctcgcaatcgcctgccagccagttatttacccaggcaagcagcacactttgcgcctcttcccaggtttcctgactgaagcccggcagtggggagatctccccccacccttcgcgctcgccttcacgcaggcaaacatacagcccgtcgcgggtttttaaccgcctgtcgcgcagaaccacccccgcgtccatggggatctgccagcggtatacctgcgcgctacgcattacggattccgtttgaatttgctgaagtcaggctgacgtttctggttgaaggcgttgcgaccttcctgaccttcttccgtcatgtagaacagcatggtggcgttgcccgccagctcctgcagccccgcctgcccgtcacagtcggcgttcagtgcagctttcaggcagcgcagcgccatcgggctgttttgcagcatttcgcggcaccaacggacggtttctttttccagatccgccagcggtaccacggtgttcacaaggcccatatccagcgcctgttttgcgtcgtactgacggcacaggaaccagatttcacgcgcttttttctgcccgacgatgcgagccatgtaggaagcgccccagccgccgtcgaaggaaccgactttcgggccagtctgaccgaagatggcattatctgccgcgatagtcaggtcgcacatcatgtgcagaacgtgaccgccgccgatggagtagccagccaccatcgcgacaaccggtttcggacaggtacggatctgacgctggaagtccagcacattcaggtgatgtacgccggaatcatctttatagccgccgtaatcaccacgcactttctggtcaccaccggagcagaacgctttatcgcctgcaccagtcagaatgatcacgccgatgttgtcgtcataacgcgcatctgccagcgcctggatcatctcttttaccgtcagaggacggaaggcattgcgcacctgcggacgattaatggtgatttttgcgataccgtcggtggatttttcataacgaatgtcctcgaaaccttcggagcagtcgtgccattcaaccggtgcgtaaagcattgcttcatcaggataaatcatattgtgtcctttagtcagaaacgcaagatctgcgccagacttgcgattacgccagcgggattttcccgatgcgcgttatgtccggcgcgaggaatgacatggcagtcggcagccagttccgccgccagggcgcggaatttgctgtcacgttcaccacataaataataaaacgcaaatgtgcgggcgctaaggttagcacgtaaatcaggctggacggcgagagaagtcgcctccagcatggcggcaagcgttgcgccattattgttgctgcgcagcgccaccagctcccggcgttgatcgtcattgagactggcaaaaacaggctgttgataccagtcggcaaataccgccgttaacggttctgtgagaaaacgctgcacccattggcgatcggaacgctgacgttccgcacgttgttcagcattttgcagccccggatgcccgccttcgacaataaccccacaaagccccgccagcccctggcaagccgccatcatcgccacccgtccaccaaggctgtaccccaccagccagaagtcaaggatgttgtaactaaccaaggttttacgcagtaagtcggtgacatcatcaaatccatcgacgctaatcgccgcgctaccaccgtgacctgggagatcaacatacaaccgactgtagtcggcaaacgcctcgcccacttcttgccattcgtggcaatcgccggaaaaaccgtgcaaaaacaccagccagggtaaacctggttttccgtgttttgcctgcgcgtgcaggatcataaatggcttacctgcgccagaagttgctggagcgtttgcgcaccatcggtgtcgttaaccaccatttcaatcaccgtggtggttggcgtgcgccaggcgtcggcaaatgccgtttcaagttcctgccagttttgcggacgatgatatttcagctcgaacatcgcggcggcgtgctcaaaatggacgttttgcggcatcagatagaaacgctcacgctcgctttgcggcgttggcaacaggctgaaaatttgcccgccgttgttgttcaccacaattaataccagcggcgcagaaacctgacgcaataacgccagcgcgttgagatcgtaaagtgcggagagatcgcccacaatcgccagcgtcggtttgccgcttgcccgctgaacgccggcggcggtgctaagcagcccgtcgataccgctggccccacggttgctgtacaccgggtaacctgccggaagttggctaagcgcatcaatcagacgtaccaccaggctgttaccaacaaacaattgcccctgttcaggcagatagtcgcagatgcgatgcgccagttgcgcttcgccaaacgcatcacggcgggcaataaccgcctgcattgcctgttccgccaggcgcgggatttcaacgcaccagggctggcgtttttctgccggatgcagctccagccagtcggcaatattggcaattaagcgacgtccgcgatggtgtgccggatcaagtcgcccttcaatgtcatcaacaatccagtactcttctggttcacagcttgcctgccattgcaggagccgtttccccgtcaggctgcttcccagttgcaccacaatttgcgcctgctgcagctcgctggtcgctttggcattgcctaaccaaagatcggcacacggcagcggctgcccggtttgactcagcacatcgccaatcagcggccagccaagagtttgcgcccacagggcaacttttttgccctcttccgcactcatgcgcccggcaaccaccacgccgcgcttttgtcgccagaagaaccagtcgcgctgtttttcactttccagacgaggcgcttcacgcagccacggtttgtcttcctgccaccagtcacccagacgctgttgccagctaagcccggtatcgtccatttcgccatacagcggttcagcaaacgggcagttgatatggactccccccgcatgaagcgtaccgagagcgtggtcgatggtagaaaccagccaacgtgcggggatatcctgggtcgggcgcggcaaactaatactgtgcgtggggtgagaggcgaacattcccggctggcgaattgcctgattcgcgccgcagtcaattagctccggcgggcgatcggcggttaagagaatcagtttttctccggttaacccggcttcaatcagtgccggatagagatttgccaccgccgtgccggaggtcacaatcaccgccaccggctgcttgctgactttcgccagccccagcgccagatgccccaacccacgctcatcgaaatgggtgtggtgaatgaatgcggaattctccgccgccgctaacgttaacggtgtagaacggctgcctggggcgatacagatgtgtctgacgccgtgacgcgttaatgcttccagaatgaccgccgcccagcgtcggttaaatgcgcttacactcatgagtttgtccggtatcaatattgcggctaagtataaggagctacaaaaatagattattgatatgaatcggtaatgatgcgactcattattattccatttgtaataaagtacgcagccctgccgctttgttgtcgatttcctgccactcttgctcggggtcggaaccacggacaatgcccgcgccagcatataatcgcacgacattgccgctaatttttgcactgcgcagggaaacgcagaattcgctttgttgtaaactgagatagcccgcagaaccggcgtaccattctcgggtgaacggttcgtgacgggcgataaactgtcgcgccagatcgcgcggtaagccagcaactgctgccgttggctgcaactgatgtaaacagatcacatcatccgctttgttgagactagtccagatacagcggcgaagatgctgcactttacgcagacgcagtacctgcggcggtaaaacatccagcgtctgggtatcggcctgtaatcgttgacagatatcttccaccaccagcatgttctcgcgctggtttttatcatccgccatcagccactctcctaactgctgcgcctgcttatcatcaggattatttgctactgttcccgccagcgcttcagtacgcagcgctttgtcacgccgccgccataaccgttccggactagagccaagaaaagcattttcgccatcaaaggccatgtaaaaatggtagcaattcagattcagtcgacgactggcagccatcatcgccgccgcgttgaccggacttgcgaaatgcaggtcagttgcccgagcgagcaccactttgtcgagctcaccttcggcgatggttttcgttgccagttcgattaattgcgtccagcccgttttgtccggccagtgttgttctcgcgtggtggttaaatgtaacccaggcaagggcttgatactcaccagtgtggcgataaattcttttgcctgaatcgcatcgtgctgaagggagctttcgctgaatagcgtcagccgcagcgtggctttaccgccacagcgtcgccattccaggcggggtaaaagtaaattgccctggctcgggtcaaaagcattcagcccccaaatgcgtaagtcggcgtgttccgggtgctggcgaagaaaacgttgtgcctggtccaagctcgtaaaacgggtaatcgcgcccaggacgacagcttcttcatcaccattacgttgttgccagtagaattgcgggtatgtttgctgactggccagccagctcaaggcatcaaaagcgtctttgagagggaaaggaatatcgataacccgaatgccgggtgtcgccggaatctcttggctcaaatggcgcagtagattttccagcgccgtagtaagactttgcacgcggacctctccctgttaaaagcctcacattatacggggtactacaaaaaaaatgcagtaccccggtgtagggaggttttaacggcgtgccagcaacagtcctagtaccagcccaacggccgcgcccacaccaattccttgccagggtttttcgtggacgtagtcatcagcacgataaactgcctgcttcgcccgatagtaataactgtcactagcctggctaacccgttttttcacatcatccagcgctttttctgcacgcgctttcagctcaacatatttctgatcggcgggatcgccagaggagcggagcacctcttccagtgtttcactaagcagcgtcaggtcgtcatcgatacgtgtatcaccaaactgattagacattctcgttctccatttgcgtaaaacctgtcactaactatagacaagggttgttgattacgcctgaattacctcgcgtgccatcccaatgtgtgggataccatcttcttcatagacctccgtcacagggataaaaccgaaactctggtagaagttttgcagatgcgcctgcgccccgaggtaaacaggcttatcaggccagtgatgcgtacatgtttcgagtgttttactcatcagctgctgccccactttttcgccacgcaacgcttcactgacaatcacccgacctataacgaccggctcaagatcatcatcacttttcagaatcctcgcatacgccaccagttcatcatttttccaaccgagaatatggcgattatcccccgtcaaatcatcaccatcgatatcctgataagggcaattctgctcgacaacaaacaccgcgcaacgcagttgtaataaggcataaagctgggaaacgcttaattcagagtgatgcagatcttgccattcaatcataatgctctccttttagatgtatgccttatactagccggaatattttttgaaacgtgatgaactcatggaattaatttttttaggtactagtgccggtgtgccaacccgcacgcgcaatgtcacggcaatattgcttaacctgcaacatccgacccagagcggactttggttgtttgactgcggtgaaggcacccagcatcagctactgcataccgcctttaaccctggaaaactggacaagatttttatcagtcaccttcatggcgatcatctttttggtttacccggcttgctgtgcagtcgttctatgagtggcattatccaacccttaacgatttatggtccgcaaggtatccgtgaatttgtggaaaccgcgctgcggattagcggcagttggaccgattatccgctggaaattgtcgaaattggcgctggcgaaattctcgatgatggcctgcgcaaagtaaccgcttatccgctggaacacccactggaatgttatggctatcgtattgaagaacatgataaaccgggtgcattaaatgcccaggcattaaaagctgctggcgtgccgcctggcccactgtttcaggaattaaaagcgggcaaaacaatcacgctggaagatggaaggcagattaacggcgcagattacttagctgctccagtgccaggtaaagcgctcgctattttcggcgataccggcccctgcgatgccgcacttgacctggctaaaggtgtcgatgtcatggtgcacgaagcgacgctggatataaccatggaagccaaagccaatagtcgcggccatagctctacacgccaggctgcgacactagcccgtgaggctggagtcggcaagctaatcattacccacgtcagcagccgctatgatgacaaaggttgtcagcacctgttacgtgaatgcaggagtattttcccggcgactgaactggcgaatgatttcaccgtgtttaacgtttaactctgcttattattaaaaacagggcgaaacttgccctgttatcgcaacccgcgctacatatatccacccacacaggcatattgagcgatttttgatatttattcatctccttacgcactatattcagagcaataagttgcctcttttcatcttgattcagcacaacctttgcaactaaaaggagcccatgatggttacagttgtcagcaattattgtcaattatctcaaacgcaactcagtcagacatttgcagaaaaatttactgtgaccgaggaattactgcagtctttaaaaaaaacagcgttatccggagatgaagaaagcattgagttactgcataatattgcgttaggttatgataaatttgggaaagaagctgaagatattctttaccatattgttagaaccccaacaaatgagaccctaagcattatccgacttatcaaaaatgcttgtttaaaattatataatctggcacatatcgcaaccaactcccccctcaaaagtcatgatagtgatgatctcctgttcaaaaaactattctcccctagcaaattaatgacaattatcggtgatgaaattcctcttatatctgaaaaacagagccttagtaaggtgcttttaaatgatgagaataatgaactgagtgatggtacaaacttctgggataaaaatcgtcaattaaccacagatgaaatagcttgctatcttcagaagatcgccgctaatgcaaaaaatactcaagtcaattatcctactggtctctacgtcccctactccaccagaactcacctggaagacgctctcaatgaaaatattaagagcgatccaagttggccgaatgaagtccagttattccccataaatactggcggacactggatattagttagcctacagaaaatagtaaataaaaaaaataataaactacaaataaaatgcgtcatattcaacagtttgcgtgcactaggctatgataaagaaaatagtcttaagcgtgtcattaatagttttaattctgaactcatgggagaaatgagcaataataatataaaagttcatttaaatgaaccagagataatatttttacatgccgatcttcagcaatacttaagccaaagttgcggtgcatttgtgtgcatggcagcccaggaagtgattgaacaaagggaaagcaattctgacagcgccccctatacgttattaaaaaaccatgctgacagatttaaaaaatatagtgcagaagagcagtacgaaattgattttcaacatcgactggcaaacagaaattgttatttagataaatatggcgatgcaaatatcaatcattattatagaaacttagaaataaaacacagtcaacccaaaaatagagcatccggcaaaagagtgagttaacatcattgttaattaattcgaccagtcagcaaatatgctgactggtcgaacatagtttgctaaacagtcatcactgactgatgtcagtcacaccatccgccagttcaatcaggcgaataaattccgccctgtaaccctgtggatcttccccttttgcctgctgagcccactgtttgatctgctgccaggaggtattgttcaggtattcagaaccgcgtaacttttgcccatatgcagctactgctgcgcgaaaacgcatatcttcagagggcgcgtttattgttggccccagcgggaattcaactaactgactttcttttccctgcgggtatttccagcgaatttttaaccaggccagttctttcgttttgtcgcttttcgctaatttgttatccggggcatagcgtaacttatcaatacttgctttttgcccgttcagcgttaattcgaataacaacgttatatgtttgcctgcgcctatatcccctgcatcaacgttgtcgttattaaaatgttccacccgaagttggcgcttttcataaccaatctgacggtattccgttacccacgcggggttaaactcaatttgcgctttgacatcttttgctacggtaatcaacatctgccgcatttcactattcaatactttctgcgcttcagagagggtatcaatgtagctgtagttgccgttaccaacatcggcaattcgcaccatcattgcctcgttgtaattgctattccccacgccaaacgtgctcagagtaacaccagactcccgctgttttttgaccatactttcaatgctttttggatcgtcaatgccaacgttaaagtcaccgtcagtggctaataaaatgcgattgatgccgcccttaataaaccccttcgtcgcctgctgataagccagttccagcccggcaccgccattggtactgccttcggcatccaggctatcaattgcggcattaatttccgccttatgactcccggagatagaaggcaatgcaatacgggagtcgccagcgtaggtcacgatggcaatgttatcctgctcacgaagttctttgaccaataatttcaagctagactggataagtggcaaacgttcatcagaaatcatactaccagaagtgtcgataagaaagaccagattagaagctggtaactcttcacttttgcgatctttcgccaggatatcaactttcagcaatgttcgctgttcattccatggtgcaggtgccaattcgtagcgcatagcgaaaggtattggcttagaggccggaatagattgtttgtctttgatatcccaatcagacgggaaataattgactatctcctccacccgcacagcgtctggcggaggtaacagcccttgattgaggaaacgccttacattcgcataactgccagtgtcaacgtcaagactaaacgtcgccaacggattttgcgctacctgcttaaccggattatcatcgaactgctggtagcgagcggttcctggatttgcgatatgtgtagcttttgctttagccgctcttgcaaatgttggcgcttcctgcaatcgcccctgtaaagcctgtttgtcactatattgttgcacttcttgctgggccaaggctttcgcggcggcggcgctttgctcagcctcttttattgcagcttgctgcgcggcaagcacttgctgctctgtgggagtactgggttgttgttgctgactttccttattctcaggttgcggcccacatccactcaaaatcaaactactcataagcaacatgattatatttttatttcgcatataaaatccttttaaataaactcaggcaccagacataaaatatactctttgtataatcctgctaatcttaataaaatacaatatcgaaacccatagcaaataatgattcaacaacgcaacccattaataatttgcatatgaaaaaaataatctttgcttttattatattatttgtgtttttactccctatgattattttttaccaaccctgggtcaatgcattaccgagtacgccccgacacgcaagtcctgagcaattagaaaaaacagttcgttatcttacacaaactgtgcatccacgtagtgccgacaatattgataatctgaataggtccgcagaatatataaaagaggtctttgtcagtagcggtgccagagttaccagccaggacgtccccattacgggtggcccctacaaaaacattgttgctgattatggtcctgccgatggaccgctgattattattggtgcgcattatgactctgccagcagttatgaaaacgatcaattgacctatacgccgggcgcggatgataacgccagcggtgtggcaggattactcgaactggcacgtttgttacatcagcaagtaccgaaaacaggcgtgcagctggtcgcctatgcgagcgaagaaccgcccttctttcgtagcgatgaaatggggagcgcggtgcatgcagctagccttgagcgtccagtgaaattaatgatagcactggagatgattggctattacgactctgcgcctggaagccagaattacccttacccggcaatgtcctggctttatcccgatcggggagactttattgccgtggtcggcagaatacaggatatcaacgccgttcgtcaggtaaaagcggcattgttgagttctcaggatttatctgtttattctatgaataccccagggtttattcccggtattgatttctctgaccacctgaattattggcaacacgatattcccgccataatgattactgacaccgctttttatcgtaataaacaataccacttgcccggtgataccgcagacagattgaattatcagaaaatggctcaggtagtggatggtgttataactttgttatacaacagtaaataataaaaatttctcgaggcgggtccagaaaaagcgacatgcacattttattttccctcatctgttttaagatgcgaaacatgaaattcaacggaggaaaaataaatgggaatgattggctattttgcagaaattgacagtgaaaagattaaccaactgcttgagtctactgaaaaacctttgatggataatatacatgacacgcttagtggattacgccgactggatattgataaacgctgggattttttacactttgggctgacaggcacctctgcttttgatcccgcgaagaatgatccgctgagtcgtgccgtgcttggtgaacacagcctcgaagatggcatagatggcttccttggattgacctggaatcaggagttagccgcgacaatcgaccgactggaaagtctggatcgaaatgaactgcgtaaacagttttccattaagcgactcaatgaaatggagatttatccgggagtgacctttagtgaagagttagaggggcaactctttgccagcatcatgcttgatatggaaaagctgattagcgcgtatcgacgtatgctgcgacaagggaatcatgcgctgacggttattgttgggtgatatagcttgatgcctgggggagaaagacccattagttaagatttacgccaggatcatcttgaaaaaatctttaaccatggtccggtttttatccccttgtataaatattactaaatgcttgcttagtcgcattgttaaatgcaataccgtatattcggtatgtaacagcgatatcctctgtgctggcaacgatctgtcatgcttgatgaaaacggaattgaacctgtcattaccaggtagataaaaagcctgttcaattttgggattattttttataactcgtgtctgttatggcgacacgggaaaacatcaatattgtccttcacaaattgcagtaatatagaatcaacctctcttgcaagttggtcacaatgtattataagcattttgaatatgtcatcctctgtaatctcgtgaaaattttcggccttgtcttttagctcatcatatcggattcttgcagtaaccattttttgggcgagttctaataaccccaaagcttgcaattgctggtgagtatgatcactttcaaaaaatatcccacactccattccttcccaaccaacatattcatgccattcataaaccagcataaatgtttgtaaaactggcggtaataattggatatctgcaaaaccaaaccaaaacttacgcttgagatcccactcatattcaatcgccaatgctatattgtttaaggcatctccggcatccttatttttacgcaaaatcaattccgtcagtgtatagcgttgttcatcaatacgccgaagagcttctgcaatatcatagtttgtagccaacaaaacattctctgcttcctgatgagtgacgtctgcttttgccgtcaatatattgatttggtcaatatgaaacaacttgatggcttcatcaacatcaccgccagtcctctctaacaaacgtctggcaacctggataccgacaggtacgttcttccgaagtttacgaatttcacttaaccattccatgtcaaacccctttaaatatttatgatattaaatataacaacgtctggataacgacccggcctgactgaatatctcacgttttcctgcttaacattcatgttatgatgctcttgaaactaataatacgtatggaattgtcactatttatctgctaatgaatagtaacaatgtcattcgtttgatgaatatattatttcagggaataattatgacacctttagaacgcattacccaacttgttaatatcaatggtgatgttaataatcctgatactcctcgtccattgttatctcttgaggatttttttattgacaataatatccatggtagtatatgttgcaatgtgattccagaacaatctccgcaagctatctatcaccattttctgaaaatacgtgagcgtaacaatgttagtgatgttttggtagaaattacgatgttcgatgacccagactggccctttagtgaaagtattttagttatcaccactgctagtccagaagaagttcagagctggtttgtagaagaaattgcccctgatgagtgctgggaaggatggagtgaagatacggagcatggatgggttgaagtccctgtgggtatgcatccggttacttgttggtgggattaaaacatttatataaacagataagcggatgtttacataaatttttatgtgaaggaacatgatgaaacttattcctcgcagtagtgatattagtcctggcattgatggaatttgcccggggccttttcctccgaacggatttaccgtacttacagatgcagcatatggtaacggagactgtttcggtttgtactggcctattggtcaggagcataaactacctatagtgtgcgaaacgtaccatgacgaatggcgaatcgtacctgccttttccagcattaagaagttcgaagaatggctggaagtgaatgatgatgatccccatgaaaatggcatcagcatcgaagatcaagactttgcagcaaatctcttccgtgttgctcggaaatgtcttagtacgggaaggcttgatgacgcactgccactgttacagcgagcaacagaacaattgcctgaagtcagcgaatattggttagcactggcaatccagtatcgccgatgtaaaaaaacagaagctgcagcacaggctgcgcttaatgcttatcttggcaattgggcatttggtgttcctgacaataaagtcattcatttgctgagtcaggccgcagatgtcccgaatttccaggatgatcctgtgattcagtgcattaaagaacaaggattagatcttagctttggaggaacaaaggaaaataataattaccccttgatgcagatgtgtgttgatacttattttgcgcagagaaaaccgcttcaggcattaaccctgttacataattatgcctggataatgtccagtgaaacgactgcatttcaggaacgctatgattttaatatcgatgaatggcgggcaaaattcaggcagttatgtttagagtattttggcgatagtcgtacacagttcacttaacgctctgcgtctatctactatcccttctttttcagaaaaaccgccgagcatgtcggcggctttctgacttacaaagtaacagattacatcagcggcattgccaaacgcacaatgctaatcagcggttgtggccatacacccagcaccagtaccaacagtgcagagatcagcacaacgataccgcccgcgctgtactgccagttacttggtgcatcgcgacccggttgttccggggcgtgaagatacaggctcaccgccacgcgcaggtagtagtagaggccgattgcgctaccgacaaccacggcacccaccagccaccacaagtgtgcctggacaccgaccgccagcacgtagaacttaccgataaagcccagcgtcatcgggataccggccagagacagcatcatcaccgtcatcactgccgcgaggatcggacgatgccagaacagaccgcggtaagagaacagggaatcagcatccgggccacgatacgggctggacatcaggctgaccacgccgaacgcgccgaggctgctgaacagataaccggccaggtaaacccctaccgcttccatgctcatctcgccggtttgcagcgcaatcagcgctaccagcagatagccgaggtgagagatagaactgtaaccgagcagacgtttgatattggtctggctcagcgccatcaggttaccgaagatgatggaggcaaaggcgataatcgccagcaccacgcgaatcgcttcgctgtcacccaccggtgcgtagaggaacagacgcatcaccacaccgaagatagcgattttgctcgccgtcgccaggaaagtggaaaccggcgcaggcgcgccctggtatacgtctggcgtccacaggtggaacggcaccagagagagtttgaagccgaggccaacaatcatcaggccgaaacctgccagcaacagcggctcgttgagcataccgtcgccaaggtttttacccaacgcgacaaagctcaggtcgccagactgcgcatacaccagcgccataccaaacagcaggaaagaagacgctgcggcagaaaggatggtgtatttgatactggcttccagactacgtttctggcggaaagcgtaaccgaccaggccaaacagcggcaaagagatcagttcgataccgaggaacagagacgccagatggttggcattcgccagcaggatcccgcccagcgcggcaattaacaccaacaggtagaactcatccttgttgtcgttatagccttcaagccacgggtaggcgaaagtacaggtggcgaggctcgccaacaataccagcccggtgtaaagcatggcgaaaccatcaacgcgcatcagcggcgtaacgtccatagcgcccgcctggccaacaaaccagagcgaaaccagcgccgcgttaagcccaataaccgagagcgtagcgttgaggaaatgattgcgtcgccacgcaatggagagcatcacaaccaccaccgtcaagccgacgatcagcaacggtagcagtgcgatcaggttttgtggagttattgtcatggcgatttacggccttgtagtagtaacggaattaacaaaccactgctggatattgccaatcgcggagtggctggtatccagaatcggctgcggatagaagcccagcagtaccagcagcaccaccagcaacaggatcataaacagctcacgcaggctcatccctggcagttcctggctggcaatctggcttttcgctttaccgaagtaagcgcgatgtaacatcgccaggctataaacagatgcaaagaccagcccaaaggtagagataacggtaatcaccggtacaacctggaagctgccgaacagaatcataaattcgccgacgaagttaccggtgccaggcatcccaagcgttgccaccgcaaagaacaggctcagtgctggcagccatttcatcttgctccacagaccgcccatcatgcgcatgtcgcgggtatggatacgttcataaagctgaccacaaagaataaacagacccgccgcgctcaaaccgtgcgcaatcatctggattaccgcgccctggtaggccaactggctgccggtgtagatagcaatcagcacgaagcccatgtgggaaacgctggtgtaggcgatcagacgtttgatatcggtctgggcgaaggccatccacgcaccgtagaagatgccgataacacccagccacatagcaattggcgcgaactctgcgctcgcgttcgggaacagcggcagggagaaacgcagcaaaccgtaagcggcagttttcagcaagatccccgcgaggtcaacggaaccggcggtcggagcctgggagtgcgcatccggcagccagccatgcagcggaaccaccggcattttgactgcgaaggcgatgaagaagcccagcattaacaggtattccacaccactggacattggcgtattcagcagctcttcatagttgaaggtccagacgccggtcgcattgtagtgaacaaaaaccagcgccaggatggcaatcaacatcaccaggccactcgcctgggtgtaaatgaagaacttggttgccgccgtgatacgcgttttaccgtcagaggctttatgcccccacagtgcgatcaggaagtacatcggcaccagcatcatttcccagaagaagaagaacaggaacatgtcgatggcaaggaacacgccgataacgccgcccaggatccacatcaggttgaggtggaagaagccctgatatttttcgatctctttccagctacatagtaccgccagcacaccgagcagaccggtcagcacgaccatcagcaggctcagcccgtcaatggcgagatgaatagagataccaaaacgcgggatccacggcatgtcgaattcagactgccactgcggaattccggcggattgcgtcagactataaccgccctgcaaccacagttgcaggctcagcgccagcgtcaatcccatggtgatcagcgcgatccagcgtggcaccttgacgccaaagcgttcggtctgccagcacaggaagccgccaataaagggaattaatattagccagggtagtaacatggcgatctttattccttgtaaaagtcccgtcaggaccggattttcaacgaattctcacgacagaaaattctcttcggactgggggtagtgtcggatgcaccgcgaaggcggcttatccgacctacgttcttatatgcccaggggcaatcccacaatccttaactcaacgcagtaccatcaacagtgccagcaccacgaccgcaccgatgctcatggatgccacataccagcgcagatagccgttctcacttaacagcagacctttacctgcaaagcgggaaaggacagccgggatgttcatcatactgttcagcggatcgcgtttcagcaaccaggcaatacccaggaacggcttgacgaacactttgtcatacagccagtcaaatccccaggcgttgtaccaccaggtgcccagcagacggcccggcgcactgttggcgatggaggtcaccagagtacgtttacccagccacagccaggctgccagcagaatgccgaccaccgcgaccacgccagaggtaatttccagggtcaacatgctgccgtgcgccagttccgtcgtttgcggaagcacgccctgcagcggcggtacaatcagtgcgccaacgaaggtggaaaggatcagcagcacaatcagcggcaggctgtgagttacccctttcacggcgtgagcgtgaatttgttcttttccgtggaagacgatgaaaatcatacggaaggtgtagaggctggtcataaacgcaccgaccagacctgccaccatcagattgatatgaccattcgccatcgcacccgcgaggatctcatccttactgaagaagcccgcagtgaccagcggtagtgcgctcagtgctgcgccgcccaccaggaagcagagataaaccagcggaatagatttacgcagaccgcccatcttgaagatgttctgttcgtgatggcaggccagaatgacggaaccggatgccaggaacagcagcgctttaaagaacgcgtgggtcatcaagtggaaaatcgccgcatcccatgcctgcacgccaagcgcgaggaacatgtagccaatctggctcatggtagagtaagcgagaacacgtttgatgtcggtctgtaccagcgcggcaaaaccggccagcagcagcgtaaccgccccgacaatacccaccagatgcagaacttccggcgtcatcaggaacaggccgtgggtacgggcgatcaggtagacacccgcggttaccatggttgcggcgtggatcagcgcggagacaggcgtcgggcccgccatcgcgtcggcaagccatgtctgcaacggcaactgcgcagatttaccgaccgcaccgcccagcagcatcagcgtcgcccacatcagcatgttattgccgtcagcaaagtgcgctggtgccagttccaccatttcgcggaagttcagggtgcccagttcgttgtaaagaatgaacagtgcgaaagcgaggaacacgtcacccacacgggtcacgacgaacgctttcattgccgctgcgccattcttcggatcggtgtaatagaacccgatcagcagataggagcacaggcccacgccttcccagccgaggtacatcagcagcaggttgtcggcaagcaccagaaccaccatgctggcgatgaacaggttggtgtaagcgaagaagcgagagtagccctcttcaccgcgcatataccaggaggcgtacatgtgaataaggaaacccacaccagtgaccacgctgagcatggtcaggctcaggccgtccagcaccaggttaaaaccgatgttaaagtcgcctacgctcatccacgtccacagcggctggctgtatgtctgctcgccgttagcgaagaaatcaacgccgataaaggcggttaccagcgccgccaggcccacagagcctacgccgacgatcgcgctgacgttttcagaccagcgcccacgggagaatgccagcaggacgaagccaatcaatggcaaaataatggttaaggcaagcatgttcatccgcgcatctcacttacactatcgatgttcaggttctggcgacgacggtgaagttgcagcagcagcgcaaggccgatactcgcttctgccgccgcgaggctgatggcgagaatgtacatcacctgaccgtcggtctggccccagtagcttccggcgaccacgaaggccagcgcggaggcgttaatcatgatttccagaccaatcaacataaacagcagattgcgacggataaccagaccggttaagccaagaacgaataagattgccgcgaggatcagtccatgttgtaaggggatcatgcgtgctcctccgtttttcttttcgcgctgtcgtctttacgattgctcagcacttcacccgcacgctcttcacgaccgacgtggaaggccacaaccagacctgcgagcagcagcatagaagccagttccaccgccagtacgtaaggcccgaacagcgtaatacccactgctttagcactgattggcgtaccgtcgataccctgatcgttaacaccgaggatggcgtaaacaatcaccaccagcatgatggcgctcaaaattgccggaccaatccacacctgcggtttcagccactggcgttcctgttcgatttcactaccgcccaggttgagcatcatcaccacgaacacgaacagcaccataatggcacccgcgtagacgataatttccagcgcaccggcgaagtaagcgcccagactgaagaacaccccggaaatcgccagcaggctaataatcaggtacagcagtgcgtgtaccggattggtatgggtgatcactcgcaaggtcgcaagtatggctatcaggccacagatataaaaagcgaactccattgcccctctccttacggtaacaggctcttgacgtcgataggcttggcttcgttctctgcttcgcccttatctttgccgtcgattgccatacctgccatccggtagaagttatattccgggtatttgcccggaccggagatcagcagatcctctttctcgtaaaccagatcctggcgcttgtattcccccatttcgaaatccggggttaactgaatcgccgtggtcggacaggcttcttcgcacagaccacagaaaatgcagcgactgaagttgatgcggaaaaattccgggtaccagcgaccgtctttggtttctgctttttgcaggctgatacagccgaccgggcaggctaccgcgcagaggttacaggctacgcaacgctcttcgccgtccgggtcgcgggtcagaacgatacgaccacgataacggggcggcagatagaccggctcttccgggtacattcgcgtttcgcgtttggcgaacgcgtgcaggccgatcatccagatactacgaacctgggtgccgaaacctactaacaattcttttaaggtcatggtcttattgccccttattgcgcctgccagagaatgacagccgccgttaccagcaagttgatcagcgtcagcggcaggcagattttccagccgaaggacattacctggtcataacgcggacgcggtaagctcgcacgaatcaaaatgaacatcatcataaagaacgcggttttcagcgcgaaccagatgaatggcggtaacaacgggccttgccagccaccgaagaacagcgtcaccatcaatgcagagatggtcacaatcccgatgtactcacccacgaagaacagaccgaacttcataccggaatattcaatgtggtaaccatccgccagttcctgctcggcttccggctggtcaaacgggtgacggtgacataccgccacgcccgcgatggcaaaggtaataaaaccaaagaattgcgggataacgttccacacatgcgcctggctgttgacgatgtcggtcatgttgaaactaccggcctgcgccaccacgcccatcaaggaaagcccgaggaacacttcgtagctcagggtctgcgcagaagcacgcatcgcacccagcaagctgtatttgttgttactactccagcccgcaaacagcaccgcgtaaaccgccagacctgccatcatcaggaagaacaaaatcccgatgttcaggtcggcaaccacccaacccggactgactggcacaatcgcaaaggccagcagcaggctggtaaaggcaatcatcggtgccagggtaaagatgacgcgatcgctgaatttcgggatccagtcttctttaaagaacattttgatcatgtccgcaaccagctggaggctaccgccccagccaacacggttaggtccgtaacggttctggaacagacccagcaggcgacgttcgccaaagctcatgaatgccccgcaggtgacaaccaccagcaggatcaccaccgctttgaggatggtcagcaggatctcaatcagttccggacttatccaactcattgttgtgcctccttgagatcctcaagatgcgcgccagccagcaccggagcaatgccggacatacccatcggcaagcccacctgccctgccgtcagtccttcggcgatttcaaccggcagcgtgaccgtgttgccatcgtaactaaaggagacgcgtgtacctgcgttcacacccaacttcgcggcatccgctgggttgagtttgatgtacggctgcggcatacggctctggaagaccggagcacgctgactcaattcatcgctgccaaacaggtggtaatacggcgcgatacgccatttcccgtcctgcggctggaagcgtgccggtacgctggtgaagtaatccagaccattttcgctggtttcaaacagacgcacgcccggatcgccaaagcgcagtttgccgcccacttcgtcctggaatttgttccacgcctgcggggagttccagcccggcgcccaggcaaacggcacttggctacggtgcgcagtcggctggttgttaccttccatgctgaaggtgaacatggtgtcaatatcctgcggctgacgcggctcatgaacgctgatattggcgcgcatggcggtacgaccgctgtaacggtgcggttcacgggccagtttctgcccacgaatacggaatgtcgcatccggcgcagcatctttgatacctgccagttccgggattttcgccacaacagcgtcaatcacatggtcgagctgcgtccagtccacttcacggctcagcagggtgctgtgcaggctgtgtaaccagcgccagctttccagcatgacagttttgctgtcgtaataagcaggatcgtaaacctggaagaaacgttgggcgcggccttcgttgttgatcaccgtaccgtcgctttcagcaaagctggcagcagaaagtaccagatgggcgttttccataatcgctgtgcgttgatgatcaaccaccatcaccagcggtgctttagccagcgcagcattcacgcggatagcagaagcgtgacgatgcagatcgttttccaacaccaccaccgcgtcggcgcgtccggtttccagttcggttaacgcttcttcaaggctaccgccacccataatgcccagccccatgctgttgacggaacgggcaatcatggtgataccgacgtcagcgccgcgacctttcagggctttcgcgacgttagccgccgcctgaatcacctctaagctaccggcgttcgtcccggagataatcaacggtttcttcgcacctgccagtgcctgcacgatgacgtcgattttgctttgcagctcaggttcgataccgtcaaccgctggtgcagagttatccagcgcatgggcgatggcaaaacctaaacgcgcctgatcttcaaccggtgcgcggtaagtccacgccgcgatatcatccagacgggtgtcatcaacgttggtaacaaacagcggatgcttcgcacgttgaccgatgttgaggattgccgcaatctgccagtcagccactttctgtgctgccgccatttcgcgcgctttacctttcacagcctgacgcactgccagcgcgacgcgcgcgccggtctgggtaacgtcttcgcccagcaccagtaccgcatcgtaagattcgatttcgcgcagagccggagtataaatgccgccttcacgcagcactttcagcgccagttgcagacgttcctgctcaccgtgagcgataccggtgtagaagttttcttcgcccaccagttcacgcagcgcaaagttgctttccacgctggcacgcggagaaccaataccgatcactttcttgctctgacgcagaatatctgccgcgccctgcattgcctgttcggcgttgagggtaatgaaatcatcgccacgacgctgtactggctgacgcggacgatccttcaggttgacgtaaccgtaaccgaaacgaccacggtcgcagaggaagtagtggtttaccgtaccgttgtaacggttttcgatacgacgcagttcgccgtaacgttcaccggggctgatgttacagccgatggaacattgctggcagatgctcggcgcaaactgcatatcccatttacggttgtaacgctcggagtgcgttttgtcggtaaatacgccggtcgggcaaatttcgaccaggttaccggaaaattcgctttccagcgtgccgtcttccgggcgaccgaagtagacgttgtcgtgcgcaccgtaaacgcccagatctgtaccgtcagcgtaatctttgtagtaacgcacacagcggtagcaggcgatgcagcggttcatttcgtgagagatgaatggccccaaatcctgattacggtgggtacgtttggtgaaacggtagcgacggaagctgtgtccggtcatcacaatcatatcctgaagatggcagttaccgccctcttcacataccggacagtcgtgcgggtggttggtcatcaaccactcgaccacgctttcacggaactgtttcgcttcttcgtcgtcaatggaaataaaggtgccatcggaagccggtgtcatacaggacatcaccaggcgaccacgcgtgtcttccgcgttttggtattgcttcaccgcacactggcggcaagcaccgacacttcccagcgccggatgccagcaaaagtaaggaatatcaaggcccagagacagacaagcttccagcaggttgtccgctccgttgacctcgtattctttgccgtctacatgaattgtagccattagcatgcttccagttttctcagtcagagactgagcgttaatcgaaattcggttaccagcgctctttcagcaggttcggctgaatcccattaatcaaatgggtattgctgaacggctgtttgattcccgcctcaaattcttcgcggaaatatttgatggcgctctgtaacggctccactgcaccaggtgcgtgggcacagaaagttttacccgggcctaagaatcgacacagttgctcaagtgtttcgatatcgcccggctgaccttcaccacgctccagcgcacgcagaattttcacgctccacggcagaccgtcgcggcacggcgtacaccagccgcaggactcacgggcgaaaaactcttccaggttacgcaccaggctcaccatgttgatctcatggtcaaccgccatcgccagcgccgtacccagacggctgcccgctttaccgatactttcgaattccatcggcagatcaaggtgcgcttcggtcaggaagtcagtccccgcgccgcctggctgccaggctttaaatttcagaccatcacgcataccaccggcgtaatcttcgaggatctcgcgtgcggtggtgccgaacggcagttcccacagtcccggatttttcacccgaccggagaagcccatcagcttggtgccagcatctttacttttgctgatgttctgataccactccacgccgttagcgaggatcgccggaacgttacacagggtttcgacgttgttgacacaggtcggtttaccccatgcgccggaggttgccgggaagggtggcttgctgcgtgggttagcacgacgtccttccagggagttgattaacgctgtttcttccccgcagatgtagcgccctgccccggtatggacgaacagttcgaaatcgaaacctgttcccataatgtttttgccaagcagacccgcttcggtggcttcggcaatggcacggcgcagattaactgccgcttcgatatattcgccacgcaggaagatgtagccacggtaagctttcagcgcaaacgcggagatgagcataccttccaccagcaggtgcggcagttgctccatcaacaggcggtctttataggtgcccggctccatttcatcggcattacacagcaggtaacggatgttcatggattcgtctttcggcatcaggctccatttcaggccagtgctgaagcccgcgccgccgcgccctttcagaccagcgtcttttacctgattaacgatttcgtccggagacagcccggtcagcgccttacgcgcgccttcgtaaccgtttttgctgcggtattcgtccagccacactggctgtttgtcatcgcgcagacgccaggtcagcggatgcgtttcgggagtacggataatgtttttcatttataccgctccagcagttcagggatcgcttccggggtcagatgcgcgtgagtgtcctcatcgatcatcatgtttggccctttatcacagttccccaggcagcaagttggcagcagcgtaaagcggccatcaaatgtcgtttgccctggtttgatgttcagctttttctcgagcgccgcctgaataccctgataaccgttgatatgacagaccacgctgtcacaataacggatcacatggcgaccaaccggctggcggaagatctgactgtagaacgttgccacaccttcgacgtcgcttgccggaatacccagcacatcggcgatcgcgtggatcgcaccatccggcacccagccacgctgcttctgaacgattttcagcgcttcaatggacgccgcacgcgggtcttcgtagtggtgcatctcgtgctcgatcgcttcacgctctgccgcactcagctcaaaagcctcggtttgtggttgttgattctcgtgcataattagcggtccacatcactcataacaaaatcgatactgcccagataaacaatcaggtcagacaccaggctgccgcggatcgccgccggaatttgctgcaaatgcgcaaagctcggggtacgaacacgggtgcggtaactcatggtgctgccgtcgctggtcaggtagtaactgttgatccctttggtcgcctcaatcatctggaaagattcattggcaggcatcaccggaccccagctcacttgcaggaagtgggtgatcagggtttcgatatgttgcagcgtgcgctctttcggcggcggcgtggtcagcgggtgatccgctttgaacgggccttccggcatgttgttgaggcactgctcaagaatgcgcagactctggcgcagctcttccactttaagcattacgcgggtgtagcagtcagaaacgccaccacccaccgggatttcaaagtcgaagttttcatagccagaataaggacgcgccttacgcacgtcgaagtcgatcccggtagcacgcaggcccgcgccagtggtgccccactccagcgcctctttcgcgccataggcggcaacgccctgggaacgacctttcagaatggtgttttgcagcgccgctttctcgtaagacgccagacgtttcggcatccagtcgaggaactcacgcagcaggcgatcccagccgcgcggcaggtcgtgcgctacgccgccaatacggaaccacgccgggtgcatacggaaaccagtgattgcttccaccagatcgtaaattttctgacgatcggtaaaggcgaagaacactggcgtcattgcgccgacgtcctgaataaaggtgctgatatacagcaggtgactgttgatgcggaacagttcggagagcataacgcgaatgacgttaacgcgatccggcacggtgatcccggccagtttctctaccgccagcacgtaaggcatttcgttaacgcagccgccgaggtattcgatacggtcagtatacggaatgtagctgtgccaggactggcgttcgcccattttctccgcaccacggtggtggtaaccgatgtctggtacgcagtcgacaatctcttcgccatcgagttgcaaaacgatacggaaagccccgtgcgcgctcgggtggttcggaccgaggttgaggaacatgaagtcctcgttttcggtgccgcgcttcatcccccactcttccggtttgaaggtcagggcttccatctccagatcctgtttggctttggtcagctcaaacgggctgaattcggtagcgcgcgccggataatctttacgcagcgggtgacctttccaggtttgcggcatcatgatgcgtcgcaggttcgggtgaccgtcgaaagtaatgccaaacagatcccaggtttcacgctcataccagttagcgttcgggaacagtttggtgaaggtcggtacgtgcaggtcgttttctgccagcgccaccttcagcatgatgtcgcggttacgatcgatagaaatcagatggtagaaaacggaaaaatccgcggcaggtaacccttcgcggtgtgtgcgcagacgttcgtccatgccgtgtaagtcaaacagcatgacgtaaggtttcggcagtttctttaagaaatcgccaacttccagtaattgttcacgcttgatccacacaacgggaaccccggtgcgagtcgcctgaacagtaaaggcatccggcccaaaacggttgcgcagttcgccaatcaccggatcatcaagatgatcgcgggtctgccaggcgggttcttgcgcggttaagtcggtcatattgttcaccattgcaaatggtccgtggtgactgtcggcgcagtaagcttcgcgaaatagatttaggaataagcgaagaaaaatccctttgccgacaggcgcaaattaaatctcgtcaggtgtacgcaggttagttacggcaatgcgttcaccgcgcttgcgttcgcgctcactttgcatattggcgcgataaacgccctgatcgccaaccacccaggagagcggacgacgttctttgccgatagattcctgcaacagcatcagtgcctgcatgtacgcttcaggacgcggcgggcagcccgggatatacacatcaaccgggatgaatttatcgacgccctgcacaacggaataaatatcgtacataccaccagagttggcacaggcacccatactgataacccattttggttccagcatctggtcatacagacgctgaataaccggtgccattttggtaaagcaggttcctgcaaccaccatcaggtcagcctgacgcgggctagcacgcaatacttctgcgccaaaacgcgccacgtcatgcaccgcggtaaagctagtcaccatctcaacgtaacagcaggaaagaccgaagttatacggccaaatactgtttttacgaccccagttaaccatgtcattgagcttgcccataaacacgtttttgttaacttcttgctccagagggtcggttacgatctcctgcttttgcagggggtaacggtcgttctcaccgttgggatctatgcgggtgagcgtataatccatcttaatgcctcgcggttagcgttgacgattagcgatactgttcgtttccgggttcatacgctcgcggcgactacgcgcgggcgtccagtccagcgcgccaatacgcaccagataaaccagacctgccagtaacacaaaaataaaaattgcagcttccacaaagcctacccagccgctttcgcggatagaggtactccatgcgaacagatacagcgcttcaacgtcgaagataacgaagaacatggccaccagataaaacttggcggacaggcgtaagcgggcggagccgacgctgtcgataccggattcaaacggcacgtttttgctcctcgcgcgtgcgcgaccgcctaaaaaccaaccgcctaccagcatcaggcaacacaggccaatggcaacgataagaaagatagcgaatgcccagtgatgagcgatgacttcagtggatgtactcatactcattgcttactcatcaaaagtagcgccagattcactgctcttcacggcagatggacgccacatcgattcatggggaggaataaaaaaaaccttacaatcactgtagaaattcttttatacagctaattgatgtggttttttactcctttctataaccttttgtcaactttaacaaaagtttcttcacattagtttacataatatcaacaccattagcatttaatgccctttcaccccagatccttgacgactccaggataattagatgttgttgaatcgtgtccgttgtgaagcaatggaaaaaatacgggtctattttgacaggaatttgtgtcgattcctccccccaaaagagagtattttcttgatctgtgacacgcttttgtcattccataacaaaaacgcagcaacaaatttacgtattttttaacatcattgtagcaggtgatttttttcaggcgattatttgtgcgttcgggacgtgaatctctggtggttgaaaaatgaacagttttgtacgttctgcactatgcgatgaaggatttttactaaaaaaaagccgctggggtttaaaacacccccagcggctcgttttttacactattgtctcaggaattatctatcgtccgtcgattactcgatatccctttcaatcaacaaactatcatccccttccggagcagacattgggctgtattgccacggattatggtagctctccatcgcctgatagatcacctgggccagctcattattactggacggatcatagcacagcaaatattcggtatcaggtagcggcggtaagccatctactccactcagcacacgcaggtccgggctcatcatctcaaccggccttgccgtcacgccaagaccggctttcactgccgcacgaacggccggaagcgtgctggcgacataagccagtcgccatggaatatctgctttattaagcgtcgccagcaccatatcgcgaaacgggctaggatcatccagcaatacaagagggatcggctcgcctttttgcaatatgtattccgctgcgcagtaccagtgtgttgggctggtacgcaggttcaatgccttaaacgcactaggacgatgggtggttaccatcaaatccacttcctgggattccagcatttctgccatataggcattacgtttaacgcggacatccagcgctaatttcggataaacgctactcacgcgatttaacaggaaaggtaagatcgtatcggcagattcatcactagcaccgatagttaatacgccctgaagattactgaacattaaactactgcaggcctcatcattaaaacgcaggattttcctggcgtaaccaagaagttgaatgccatgttcagttaacagtttgttgcgaccgtgacgagcgaacagttctttcccaacgagttgttccagacgctgcatttgctgacttacggcggactgagtacgacacacagcggcagctgcggcagcaaaagtgttcagatcggcaacagcaacaaatgttctcagcagatcgaggtcgaggttaattatcggacgatttgcacttatcatatattatcacttactggcggctcatactgagctggttaatgctgtgcacacacaaacaagcaattccatttgtaatgtgcctccctggcagtttcatccggaacccggacgaaagtaaaaatgcatatgagttgcactaaaaaagcgactcacattgttccgttataatgcctgaagtagatcacagaatatatcttcagggatcgcatatctattaagttactcactcttttctatttatgacatgcgcgtgtttgtataaatgtaaatgtgagtccttgttccactctcgtgcagcatcgctggtcatacgcgaacacgtaccaacagcaatggtgaggcggcatcaagagcagggatccgtcatttatccgagcattttaccccaaaaaccttttatttataagggtcattgcgaattatctgatgcaaagttatgttatgttaggcaaagtaatcttctattattaataagcacatcaaaacctttttgaatattaaataataattaattagcatcatcctcattcattaattccgcttaacaatagtttcacaccttgcccccattgcgacacctcggaaatcatcacgcagttaaactctccgtaatgaggaaatatcatcatcgcgtttcattagtgaattcttaaatgaggcattttcacacaattatcttacagataaaaaaaccagacttacaattaagaatcagaacaattcactatataacattgcatgtaaagcatatacacctcattattttgtcattattaagttattaacagcacaatcgagccttcccctctggcaaaatcttattctgcagaccttcaaaacaccgtcctgggggagtacattgttctaagctgacttccacggcagggagtggcgataacagcaaaaaaggtcaagattcatgtcccccattgaaaaatccagcaaattagagaatgtctgttatgacatccgtggtccggtgctgaaagaagcaaaacgcctggaagaagaaggtaacaaggtactgaaactgaacatcggcaacccagccccgttcggttttgacgcgccagatgaaatcctcgttgacgtgatacgcaacctgcctaccgctcaagggtattgcgattccaaaggtctttactccgcgcgtaaagccatcatgcagcactaccaggctcgtggcatgcgtgatgttaccgtggaagatatttacatcggcaatggtgtaagcgagcttatcgttcaggcaatgcaggcattgctgaacagcggggacgaaatgttggttcctgcaccagattacccactctggaccgcggcggttagcctttccagcggtaaagcggtgcattatctttgcgatgaatcctctgactggttcccggacctcgatgatattcgcgctaaaattacgcctcgtacgcgtgggatcgttattatcaacccaaataacccaaccggcgcggtatattccaaagagcttttaatggagattgtggagattgcacgtcagcataatctcattatcttcgccgatgaaatttatgacaaaattctctacgacgacgctgagcatcacagtattgcgccgctggcacctgacctgctgaccattacctttaacggactgagcaaaacgtaccgcgttgcaggcttccgtcaggggtggatggtgttgaacgggccgaaaaaacacgccaaaggctacatcgaaggtctggaaatgctggctagtatgcgcctgtgtgctaacgttcctgcgcaacacgccattcagaccgcgctaggtggttatcagagcatcagtgaatttattacccctggcggtcgtctttatgagcagcgtaaccgcgcgtgggaactgatcaacgatattccgggcgtttcctgcgtgaaacctcgtggtgcgctgtatatgttcccgaaaatcgacgccaaacgctttaacattcacgacgatcagaaaatggtgttggatttcctgttgcaggaaaaagttctgttggtgcaagggacggcattcaactggccgtggccggatcacttccgcattgtcacgctaccgcgtgtcgatgatatcgagctgtctttgagcaagttcgcgcgtttcctttctggttatcatcagctgtaatcttaatttcactgccggagattgcatccggcagcgttatcccgccacaatgacctgatgatgtcatcatacgtaaggtcactatgaaacagagccatttttttgcccatctctcccgcctgaaactcattaaccgctggccgctcatgcgcaacgtgcggacggaaaatgtgtccgaacacagtttgcaggtagcgatggtcgcccatgcgctggcagctatcaaaaatcgaaaatttggcggtaatgtcaacgccgaacgtatcgctttactggcgatgtaccacgatgccagtgaagtgctcaccggcgatctccctactccggtgaaatacttcaatagccaaatcgctcaggagtacaaggctattgaaaaaatcgctcagcaaaaactggtcgatatggttccggaagagctgcgggatatctttgcgccgttaattgacgagcatgcatatagcgatgaagaaaaaagcctggtgaaacaggcagatgcactgtgtgcatatctgaaatgtctggaagaactcgcggccggaaataatgaattcttgctggcaaaaacgcgactggaagcgacgcttgaagcgcgtcgcagccaggagatggactacttcatggaaatatttgttcccagcttccatcttagcctcgatgagattagccaggatagtccgctgtaagcagccggagtctgcgtcgcatcaggcaataagcgccggatgcgacatcaggctcttgtcaaaacggaaacagcatcgggatcatcaccacacaaaccgccatcacgataatggtgaacggtacccccaacttcacaaagtcactgaagctgtaatttcccggacctaaaaccagtgtgttaacaggactagaaaccggtgtcataaaggcggcggatgctgccatcgccacgaccatcgcgaatggataagggctcacccccatcgttttggcagcagccagcgcaatcggagccatcaacaccgccgtcgcggtattagagataaatagcccaataaccgcgctcaagacaaacaaacaccccagcatcatatgtggcccgtaaccaccgccaatgtccatcagccctttcaccgccagcgcgacacctcccgttttctgtaatgccacagcaaacggcatcatcccaacgatcaaaataatgctcggccagtgaatggatttataggcgctttcagcatctatacagcggaatttccccatcagcaggcaggcgatgatagcggcaacaggattaggaatttcatctgtcagcattaacgccaccattagcaccagacagaaaatggcatggggtgcctggctgtgcgcgggacttgcttcactcacctcttccggtaagttcagcgctacgaagtcgcggccctgtttggccagcataccgatcagtttccagttacccacaaccaggatgatatcgcccagcagcagaggctcatccgccaggctaccttccagcgccacgccattgcgctttagccccaccacattcagtccgtagcgggtacgaaaaccaatttcgcgcacgcttttaccaatcagttcactctcaggaattaaactaatctctgccatgcccacatcaagggcctggtcagaaaaatactcgccgcgcagtaccatcggctccagcaattgctcactacaaaattgccggagatcgacatcagccgcagacatatcaataagcaaaacgtcacgcgcgcgaaattcagaaaccccattaacgttcacgataacgcgacgaaaacgccgccagcgttcaacaccgatgacgttagcgccataacgctcacgtaatttgagatcatccagccgttgaccaatcattgggcttccggggcgaatagccagacgtcgcgcacgcccggtcagtcgatattcacggataagatcgcgaaaggttcgacgcgtccagccttcgcgctgcggggtctgggtatcccctttcagcatgaaacgcatcactaacatatacaaaatacccagcaccagcacgaccaggccaataggtgttacgctaaagaaactgaagccgtgatagccttcacgcagcaattcactgttgactaccaggttcggcggcgtcgccaccagcgtcatcatgccgctaatcagcccggcaaaacttaacggcatcatcagacgactcgggctcgtttgcatacgcatggcaacgcttaacaccacgggaataaagatagcgacaacgccggtactactcataaacgcgccaagccccgcgacggtcagcatcaacaaaaccaacattttgatttcactattgcccgcaactttgaccagccatgttcccattacggtggcaacaccggtacggaccaaaccatcgccaataataaacaaggcggcaatcaggacaacgttaggatcagaaaagccggaaaatacttctgggactgtcagcgttccgcttaatgcaaacgcgacaataacaaacaaagcgaccgcatccatacgcactctgcccgtcgcaaacaagacgatggcaacggccagtaaactaagaacccaaatcaattcaccgttcacaacttatccttgttaattgagggggatgacttgattctgccataaaaaagccccgacgagacggggctaaatcatgatcaggtgtttcactgaataataacatcgccatttggctgtttggtcacagtaatttgctccagactgtggaggaccaaatcgacctcattcaggcgcggggtatctgccggagcgttaaccgcaatgacatgacaacccgccgccaggccagaaagcacgccagcgggagcatcttccaccaccacacactcctgcggcgcaagccccagcagctgcgcgcctaacagatacgcatcaggttctggttttccgcgcttcactcgctcagcggttacaaacacctctggtgcgggaagcccagctattttatggcgcgctcgcgctaccggcatggagccagaagtcacaatggcccacggaatacctgctttattcaaatgactgagtaaggcgattgcccccggaagcgcggtaataccttcggtttccgtggcctcgatgtgctccagacgcgtaaactcggcggcaatatcagcctcggatttgcccgccataaaatggcgcagagaggtgatcgcctgtttaccgtgaatgaaagccagcacctcttccggcgctaacccatgacgtctggcccagttgctccacgcccgttctaccgcaggcagggaatccaccagcgttccatcaagatcaaacagaaaacctttgcaccgcacgcgggcctcctcaggcattgataatttgattaatttcgttggcgctcaaatggtactgacgcgggcaggcatgccacacattaagcatgcgctgatatttttcccacattggcgtctgggcgttaaaaccgtgagttccggcgtcaaaatgggtatagcgcccttccacattaaccataaagcggacataaccgaggtaacgtgcttcagtggcggcgtcaaagccgaggaaggtgacacgacgttcatcgatggattgctggtcctgcaaattagaccaggaaacatgcaacgcatgatacatctccataatgtcgatgatagtgcggcaggtttcttctttcagctcgccaaactcgcgatccaattcacgcatctgtaatccgtaaccacgctcaataattgtttgcaggcgacggtaacgttcagcatttgccggatcgagcatagtcatcatcttgtactgattagacaaaataagacgttgcgcgttggtcatttccattgttgactcctgtatcactctactacggtgaaaaaaaagaaggctgagtatgccttcttttatatgcgtaatcaggggtcaattacaaatcatcaaggaaagttttatccagttgtttgaaggcgcgcttaagcgtgtcagctaatgcctggtaatcaggcttgccttcaacgggtgccaacacctgtccagactcctgcaatttaccgcgaacttcataaaaccagttaaggattgcagggggtaatggcgtgacagaacgcttgcccagccaccacaatccctgcatgggtaaacttaaggcgaacagggcagtggcaactgccggcccaagctgaccgcccagggcaatctgccagcagagagtaaatacggcgatcggcggcataaaacggatcgcataacgcgtcatcttgataacgcgattttcgacaaagaccggggcaaggcgtttttccagcggccacgtcttactgtaatgctgtccccggcgaaacaagctaaaaaaattaacagaacgattatccggcgtactcatgcttcacctcaacttcacatataaagattcaaaaatttgtgcaaattcacaactcagcgggacaacgttcaaaacattttgtcttccatacccactatcaggtatcctttagcagcctgaaggcctaagtagtacatattcattgagtcgtcaaattcatatacattatgccattggctgaaaattacgcaaaatggcatagactcaagatatttcttccatcatgcaaaaaaaatttgcagtgcatgatgttaatcataaatgtcggtgtcatcatgcgctacgctctatggctccctgacgtttttttagccacgtatcaattataggtacttccatgagcagtaagttagtactggttctgaactgcggtagttctagtctgaaatttgccatcatcgatgcagtaaatggtgaagagtacctttctggtttagccgaatgtttccacctgcccgaagcacgtatcaaatggaaaatggacggcaataaacaggaagcggctttaggtgcaggcgccgctcacagcgaagcgctcaactttatcgttaatactattctggcacaaaaaccagaactgtctgcgcagctgactgctatcggtcaccgtatcgtacacggcggcgaaaagtataccagctccgtagtgatcgatgagtctgttattcagggtatcaaagatgcagcttcttttgcaccgctgcacaacccggctcacctgatcggtatcgaagaagctctgaaatctttcccacagctgaaagacaaaaacgttgctgtatttgacaccgcgttccaccagactatgccggaagagtcttacctctacgccctgccttacaacctgtacaaagagcacggcatccgtcgttacggcgcgcacggcaccagccacttctatgtaacccaggaagcggcaaaaatgctgaacaaaccggtagaagaactgaacatcatcacctgccacctgggcaacggtggttccgtttctgctatccgcaacggtaaatgcgttgacacctctatgggcctgaccccgctggaaggtctggtcatgggtacccgttctggtgatatcgatccggcgatcatcttccacctgcacgacaccctgggcatgagcgttgacgcaatcaacaaactgctgaccaaagagtctggcctgctgggtctgaccgaagtgaccagcgactgccgctatgttgaagacaactacgcgacgaaagaagacgcgaagcgcgcaatggacgtttactgccaccgcctggcgaaatacatcggtgcctacactgcgctgatggatggtcgtctggacgctgttgtattcactggtggtatcggtgaaaatgccgcaatggttcgtgaactgtctctgggcaaactgggcgtgctgggctttgaagttgatcatgaacgcaacctggctgcacgtttcggcaaatctggtttcatcaacaaagaaggtacccgtcctgcggtggttatcccaaccaacgaagaactggttatcgcgcaagacgcgagccgcctgactgcctgatttcacaccgccagctcagctggcggtgctgttttgtaacccgccaaatcggcggtaacgaaagaggataaaccgtgtcccgtattattatgctgatccctaccggaaccagcgtcggtctgaccagcgtcagccttggcgtgatccgtgcaatggaacgcaaaggcgttcgtctgagcgttttcaaacctatcgctcagccgcgtaccggtggcgatgcgcccgatcagactacgactatcgtgcgtgcgaactcttccaccacgacggccgctgaaccgctgaaaatgagctacgttgaaggtctgctttccagcaatcagaaagatgtgctgatggaagagatcgtcgcaaactaccacgctaacaccaaagacgctgaagtcgttctggttgaaggtctggtcccgacacgtaagcaccagtttgcccagtctctgaactacgaaatcgctaaaacgctgaatgcggaaatcgtcttcgttatgtctcagggcactgacaccccggaacagctgaaagagcgtatcgaactgacccgcaacagcttcggcggtgccaaaaacaccaacatcaccggcgttatcgttaacaaactgaacgcaccggttgatgaacagggtcgtactcgcccggatctgtccgagattttcgacgactcttccaaagctaaagtaaacaatgttgatccggcgaagctgcaagaatccagcccgctgccggttctcggcgctgtgccgtggagctttgacctgatcgcgactcgtgcgatcgatatggctcgccacctgaatgcgaccatcatcaacgaaggcgacatcaatactcgccgcgttaaatccgtcactttctgcgcacgcagcattccgcacatgctggagcacttccgtgccggttctctgctggtgacttccgcagaccgtcctgacgtgctggtggccgcttgcctggcagccatgaacggcgtagaaatcggtgccctgctgctgactggcggttacgaaatggacgcgcgcatttctaaactgtgcgaacgtgctttcgctaccggcctgccggtatttatggtgaacaccaacacctggcagacctctctgagcctgcagagcttcaacctggaagttccggttgacgatcacgaacgtatcgagaaagttcaggaatacgttgctaactacatcaacgctgactggatcgaatctctgactgccacttctgagcgcagccgtcgtctgtctccgcctgcgttccgttatcagctgactgaacttgcgcgcaaagcgggcaaacgtatcgtactgccggaaggtgacgaaccgcgtaccgttaaagcagccgctatctgtgctgaacgtggtatcgcaacttgcgtactgctgggtaatccggcagagatcaaccgtgttgcagcgtctcagggtgtagaactgggtgcagggattgaaatcgttgatccagaagtggttcgcgaaagctatgttggtcgtctggtcgaactgcgtaagaacaaaggcatgaccgaaaccgttgcccgcgaacagctggaagacaacgtggtgctcggtacgctgatgctggaacaggatgaagttgatggtctggtttccggtgctgttcacactaccgcaaacaccatccgtccgccgctgcagctgatcaaaactgcaccgggcagctccctggtatcttccgtgttcttcatgctgctgccggaacaggtttacgtttacggtgactgtgcgatcaacccggatccgaccgctgaacagctggcagaaatcgcgattcagtccgctgattccgctgcggccttcggtatcgaaccgcgcgttgctatgctctcctactccaccggtacttctggtgcaggtagcgacgtagaaaaagttcgcgaagcaactcgtctggcgcaggaaaaacgtcctgacctgatgatcgacggtccgctgcagtacgacgctgcggtaatggctgacgttgcgaaatccaaagcgccgaactctccggttgcaggtcgcgctaccgtgttcatcttcccggatctgaacaccggtaacaccacctacaaagcggtacagcgttctgccgacctgatctccatcgggccgatgctgcagggtatgcgcaagccggttaacgacctgtcccgtggcgcactggttgacgatatcgtctacaccatcgcgctgactgcgattcagtctgcacagcagcagtaatctcgtcatcatccgcagctttgcgctgcggatatctgaaccggaaataatcactatttccggttttttattctcttaatttgcattaatcctttctgattatcttgcttaactgcgctgcatcaatgaattgcgccatcccactttgcatacttaccactttgttttgtgcaagggaatatttgcgctatgtccgcaatcactgaatccaaaccaacaagaagatgggcaatgcccgatacgttggtgattatcttttttgttgctattttaaccagccttgccacctgggtagttccggtggggatgtttgacagtcaggaagtgcagtatcaggttgatggtcaaacaaaaacacgcaaagtcgtagatccacacagttttcgcattctgactaacgaagcaggcgaacctgagtatcaccgcgtacagctgttcacgacgggcgatgaacgcccgggcctgatgaacttcccgtttgaaggattaaccagtggaagcaaatacgggacagccgttggcatcatcatgtttatgctggtgattggcggcgcgtttggcattgtgatgcgtacaggaaccattgataacggtatcctggcgcttatt
